(19) United States
(12) Patent Application Publication
(10) Pub. No.: US 2003/0134324 A1
(43) Pub. Date: Jul. 17, 2003

(54) Identifying drugs for and diagnosis of Benign Prostatic Hyperplasia using gene expression profiles

(76) Inventors: William E. Munger, Stow, MA (US); Prakash Kulkarni, Gaithersburg, MD (US); Robert H. Getzenberg, Pittsburgh, PA (US); Iwao Waga, Yokohama-shi (JP); Jun Yamamoto, Yokohama-shi (JP)

Correspondence Address: MORGAN LEWIS & BOCKIUS LLP, 1111 PENNSYLVANIA AVENUE NW, WASHINGTON, DC, 20004, US

(21) Appl. No.: 09/873,319

(22) Filed: Jun. 5, 2001

Related U.S. Application Data
(60) Provisional application No. 60/223,323, filed on Aug. 7, 2000.

(51) Int. Cl. G01N 33/53; C12Q 1/68; G06F 19/00; G01N 33/48; G01N 33/50

(52) U.S. Cl. 435/7.1; 435/6; 702/20

(57) ABSTRACT

The present invention is based on the elucidation of the global changes in gene expression in prostate tissue isolated from patients exhibiting different clinical states of prostate hyperplasia as compared to normal prostate tissue as well as the identification of individual genes that are differentially expressed in diseased prostate tissue.

### RELATED APPLICATIONS

[0001] This application claims priority of U.S. Provisional Application No. 60/223,323, filed Aug. 7, 2000, which is herein incorporated by reference in its entirety.

### BACKGROUND OF THE INVENTION

[0002] Benign Prostatic Hyperplasia (BPH) is the most common benign tumor in men aged >60 years. It is estimated that one in four men living to the age of 80 will require treatment for this disease. BPH is usually noted clinically after the age of 50, the incidence increasing with age, but as many as two thirds of men between the ages of 40 and 49 demonstrate histological evidence of the disease.

[0003] The anatomic location of the prostate at the bladder neck enveloping the urethra plays an important role in the pathology of BPH, including bladder outlet obstruction. Two prostate components are thought to play a role in bladder outlet obstruction. The first is the relative increased prostate tissue mass. The second component is the prostatic smooth muscle tone.

[0004] The causative factors of BPH in man have been intensively studied. See Ziada et al., Urology, 53: 1-6, 1999. In general, the two most important factors appear to be aging and the presence of functional testes. Although these factors appear to be key to the development of BPH, both appear to be nonspecific.

[0005] Little is known about the molecular changes in prostate cells associated with the development and progression of BPH. It has been demonstrated that the expression levels of a number of individual genes are changed compared to normal prostate cells. These changes in gene expression include decreased expression of Wilm's tumor gene (WT-1) and increased expression of insulin growth factor II (IGF-II) (Dong et al., J. Clin. Endocrin. Metab., 82(7): 2198-220).

[0006] While the changes in the expression levels of a number of individual genes have been identified, the investigation of the global changes in gene expression has not been reported.

[0007] Accordingly, there exists a need for the investigation of the changes in global gene expression levels as well as the need for the identification of new molecular markers associated with the development and progression of BPH. Furthermore, if intervention is expected to be successful in halting or slowing down BPH, means of accurately assessing the early manifestations of BPH need to be established. One way to accurately assess the early manifestations of BPH is to identify markers which are uniquely associated with disease progression. Likewise, the development of therapeutics to prevent or stop the progression of BPH relies on the identification of genes responsible for BPH growth and function.

### SUMMARY OF THE INVENTION

[0008] The present invention is based on the elucidation of the global changes in gene expression in BPH tissue isolated from patients exhibiting different clinical states of prostate hyperplasia as compared to normal prostate tissue as well as the identification of individual genes that are differentially expressed in BPH tissue.

[0009] The invention is also based on the discovery of a means of effectively selecting disease-linked drug targets from gene expression results. The invention includes methods of classifying genes whose expression levels are changed in diseased tissues, during disease induction or during disease progression into specific groups. By using this method it is possible to classify genes whose expression are regulated by the same mechanism into the same group, and it is possible to identify representative marker genes by selecting typical genes from each cluster.

[0010] The invention includes methods of screening for or identifying an agent that modulates the onset or progression of BPH, comprising: preparing a first gene expression profile of BPH cells; exposing the cells to the agent; preparing a second gene expression profile of the agent exposed cells; and comparing the first and second gene expression profiles. In a preferred embodiment of these methods, the gene expression profile comprises the expression levels of one or more or preferably two or more genes in Tables 1-5. In another preferred embodiment of these methods, the cell is a prostate cell from a BPH patient, a cell line in Table 6, or a derivative thereof.

[0011] The invention also includes methods of monitoring a treatment of a patient with BPH, comprising administering a pharmaceutical composition to the patient; preparing a gene expression profile from a prostate cell or tissue sample from the patient; and comparing the patient gene expression profile to a gene expression profile from a normal prostate cell population, a BPH tissue or BPH cells without treatment with the pharmaceutical composition. In preferred embodiments of these methods, the gene expression profile comprises the expression levels of one or more or, preferably two or more genes in Tables 1-5.

[0012] The invention also includes methods of diagnosing benign prostatic hyperplasia (BPH) in a subject comprising the step of detecting the level of expression in a tissue or cell sample from the subject of two or more genes from Tables 1-5 (preferably Tables 3-5, and more preferably Table 5); wherein differential expression of the genes is indicative of BPH progression.

[0013] The invention further includes methods of detecting the onset or progression of benign prostatic hyperplasia (BPH) in a patient comprising the step of detecting the level of expression in a tissue or cell sample of two or more genes from Tables 1-5 (preferably Tables 3-5, and more preferably Table 5); wherein differential expression of the genes is indicative of BPH progression.

[0014] The invention also includes methods of differentiating benign prostatic hyperplasia (BPH) from prostate cancer in a patient comprising the step of detecting the level of expression in a tissue or cell sample of two or more genes from Tables 1-5 (preferably Tables 3-5, and more preferably Table 5); wherein differential expression of the genes is indicative of BPH rather than prostate cancer.

[0015] The invention also includes methods of selecting or identifying cells that can be used for drug screening.

[0016] All of these methods may include the step of detecting the expression levels of at least about 2, 3, 4, 5, 6, 7, 8, 9, 10 or more genes in any of Tables 1-5, or preferably Table 5. In a preferred embodiment, expression of all of the genes or nearly all of the genes in Tables 1-5, or preferably Table 5, may be detected.

[0017] The invention further includes sets of at least two or more probes, wherein each of the probes comprises a sequence that specifically hybridizes to a gene in Tables 1-5 as well as solid supports comprising at least two or more of the probes.

[0018] The invention also includes computer systems comprising or linked to a database containing information identifying the expression level in BPH tissue or cells of a set of genes comprising at least two genes in Tables 1-5, preferably from Table 5; and a user interface to view the information. The database may further comprise sequence information for the genes as well as information identifying the expression level for the set of genes in normal prostate tissue or cells, and prostate cancer tissue. The database may further contain or be linked to descriptive information from an external database, which information correlates said genes to records in the external database.

[0019] The invention further includes methods of using the disclosed computer systems to present information identifying the expression level in a tissue or cell of a set of genes comprising at least one of the genes in Tables 1-5, preferably Table 5, comprising comparing the expression level of at least one gene in Tables 1-5, preferably Table 5, in the tissue or cell to the level of expression of the gene in the database.

[0020] Lastly, the invention includes kits comprising probes or solid supports of the invention. In some embodiments, the kits also contain written materials or software concerning gene expression information for the genes of the invention, preferably in electronic format.

### BRIEF DESCRIPTION OF THE DRAWINGS

[0021] FIG. 1. FIG. 1 shows the expression of cellular retinol binding protein RNA in various tissues.

[0022] FIG. 2. FIG. 2 shows the expression of cellular retinol binding protein RNA in various prostate tissues samples. In all of the figures, “Normal”, “−Sym”, “Cancer” and “+Sym” refer to normal prostate, BPH without symptoms, prostate cancer, and BPH with symptoms, respectively.

[0023] FIG. 3. FIG. 3 shows the expression of S100 calcium binding protein RNA in various tissues.

[0024] FIG. 4. FIG. 4 shows the expression of S100 calcium binding protein RNA in various prostate tissue samples.

[0025] FIG. 5. FIG. 5 shows the expression of PSMA RNA in various tissues.

[0026] FIG. 6. FIG. 6 shows the expression of PSMA RNA in various prostate tissue samples.

### DETAILED DESCRIPTION

[0027] Many biological functions are accomplished by altering the expression of various genes through transcriptional (e.g. through control of initiation, provision of RNA precursors, RNA processing, etc.) and/or translational control. For example, fundamental biological processes such as cell cycle, cell differentiation and cell death, are often characterized by the variations in the expression levels of groups of genes.

[0028] Changes in gene expression also are associated with pathogenesis. For example, the lack of sufficient expression of functional tumor suppressor genes and/or the over expression of oncogene/protooncogenes could lead to tumorgenesis or hyperplastic growth of cells (Marshall, Cell, 64: 313-326 (1991); Weinberg, Science, 254:1138-1146 (1991)). Thus, changes in the expression levels of particular genes (e.g. oncogenes or tumor suppressors) serve as signposts for the presence and progression of various diseases.

[0029] Monitoring changes in gene expression may also provide certain advantages during drug screening development. Often drugs are screened for the ability to interact with a major target without regard to other effects the drugs have on cells. Often such other effects cause toxicity in the whole animal, which prevent the development and use of the potential drug.

[0030] The present inventors have examined tissue from normal prostate, BPH and BPH prostate tissue immediately adjacent to malignant prostate tissue to identify the global changes in gene expression in BPH. These global changes in gene expression, also referred to as expression profiles, provide useful markers for diagnostic uses as well as markers that can be used to monitor disease states, disease progression, toxicity, drug efficacy and drug metabolism.

[0031] Assay Formats

[0032] The genes identified as being differentially expressed in BPH tissue or BPH cells (Tables 1-5) may be used in a variety of nucleic acid detection assays to detect or quantititate the expression level of a gene or multiple genes in a given sample. For example, traditional Northern blotting, nuclease protection, RT-PCR and differential display methods may be used for detecting gene expression levels. Those methods are useful for some embodiments of the invention. However, methods and assays of the invention are most efficiently designed with hybridization-based methods for detecting the expression of a large number of genes.

[0033] Any hybridization assay format may be used, including solution-based and solid support-based assay formats. Solid supports containing oligonucleotide probes for differentially expressed genes of the invention can be filters, polyvinyl chloride dishes, silicon or glass based beads or chips, etc. Such supports and hybridization methods are widely available, for example, those disclosed by Beattie (WO 95/11755). Any solid surface to which oligonucleotides can be bound, either directly or indirectly, either covalently or non-covalently, can be used.

[0034] A preferred solid support is a high density array or DNA chip. These contain a particular oligonucleotide probe in a predetermined location on the array. Each predetermined location may contain more than one molecule of the probe, but each molecule within the predetermined location has an identical sequence. Such predetermined locations are termed features. There may be, for example, from 2, 10, 100, 1000 to 10,000, 100,000 or 400,000 of such features on a single solid support. The solid support, or the area within which the probes are attached may be on the order of about a square centimeter.

[0035] Oligonucleotide probe arrays for expression monitoring can be made and used according to any technique known in the art (see for example, Lockhart et al., Nat. Biotechnol. (1996) 14, 1675-1680; McGall et al., Proc. Nat. Acad. Sci. USA (1996) 93, 13555-13460). Such probe arrays may contain at least two or more oligonucleotides that are complementary to or hybridize to two or more of the genes described in Tables 1-5 . For instance, such arrays may contain oligonucleotides that are complementary or hybridize to at least about 2, 3, 4, 5, 6, 7, 8, 9, 10, 20, 30, 50, 70 or more the genes described herein.

[0036] The genes which are assayed according to the present invention are typically in the form of mRNA or reverse transcribed mRNA. The genes may be cloned or not. The genes may be amplified or not. The cloning itself does not appear to bias the representation of genes within a population. However, it may be preferable to use polyA+ RNA as a source, as it can be used with less processing steps.

[0037] The sequences and related information of the genes described herein are available in the public databases. Tables 1-5 provide the Accession numbers and name for each of the sequences. The sequences and related information of the genes listed in the Tables according to their GenBank identifiers are expressly incorporated herein as of the filing date of this application (see: www.ncbi.nlm.nih.gov/).

[0038] Probes based on the sequences of the genes described above may be prepared by any commonly available method. Oligonucleotide probes for interrogating the tissue or cell sample are preferably of sufficient length to specifically hybridize only to appropriate, complementary genes or transcripts. Typically the oligonucleotide probes will be at least 10, 12, 14, 16, 18, 20 or 25 nucleotides in length. In some cases longer probes of at least 30, 40, or 50 nucleotides will be desirable.

[0039] As used herein, oligonucleotide sequences that are complementary to one or more of the genes described in Tables 1-5 refer to oligonucleotides that are capable of hybridizing under stringent conditions to at least part of the nucleotide sequence of said genes. Such hybridizable oligonucleotides will typically exhibit at least about 75% sequence identity at the nucleotide level to said genes, preferably about 80% or 85% sequence identity or more preferably about 90% or 95% or more sequence identity to said genes.

[0040] “Bind(s) substantially” refers to complementary hybridization between a probe nucleic acid and a target nucleic acid and embraces minor mismatches that can be accommodated by reducing the stringency of the hybridization media to achieve the desired detection of the target polynucleotide sequence.

[0041] The terms “background” or “background signal intensity” refer to hybridization signals resulting from non-specific binding, or other interactions, between the labeled target nucleic acids and components of the oligonucleotide array (e.g., the oligonucleotide probes, control probes, the array substrate, etc.). Background signals may also be produced by intrinsic fluorescence of the array components themselves. A single background signal can be calculated for the entire array, or a different background signal may be calculated for each target nucleic acid. In a preferred embodiment, background is calculated as the average hybridization signal intensity for the lowest 5% to 10% of the probes in the array, or, where a different background signal is calculated for each target gene, for the lowest 5% to 10% of the probes for each gene. Of course, one of skill in the art will appreciate that where the probes to a particular gene hybridize well and thus appear to be specifically binding to a target sequence, they should not be used in a background signal calculation. Alternatively, background may be calculated as the average hybridization signal intensity produced by hybridization to probes that are not complementary to any sequence found in the sample (e.g. probes directed to nucleic acids of the opposite sense or to genes not found in the sample such as bacterial genes where the sample is mammalian nucleic acids). Background can also be calculated as the average signal intensity produced by regions of the array that lack probes.

[0042] The phrase “hybridizing specifically to” refers to the binding, duplexing, or hybridizing of a molecule substantially to or only to a particular nucleotide sequence or sequences under stringent conditions when that sequence is present in a complex mixture (e.g., total cellular DNA or RNA).

[0043] Assays and methods of the invention may utilize available formats to simultaneously screen at least about 100, preferably about 1000, more preferably about 10,000 and most preferably about 1,000,000 different nucleic acid hybridizations.

[0044] As used herein a “probe” is defined as a nucleic acid molecule, capable of binding to a target nucleic acid of complementary sequence through one or more types of chemical bonds, usually through complementary base pairing, usually through hydrogen bond formation. As used herein, a probe may include natural (i.e., A, G, U, C, or T) or modified bases (7-deazaguanosine, inosine, etc.). In addition, the bases in probes may be joined by a linkage other than a phosphodiester bond, so long as it does not interfere with hybridization. Thus, probes may be peptide nucleic acids in which the constituent bases are joined by peptide bonds rather than phosphodiester linkages.

[0045] The term “stringent conditions” refers to conditions under which a probe will hybridize to its target subsequence, but with only insubstantial hybridization to other sequences or to other sequences such that the difference may be identified. Stringent conditions are sequence-dependent and will be different in different circumstances. Longer sequences hybridize specifically at higher temperatures. Generally, stringent conditions are selected to be about 5° C. lower than the thermal melting point (Tm) for the specific sequence at a defined ionic strength and pH.

[0046] Typically, stringent conditions will be those in which the salt concentration is at least about 0.01 to 1.0 M Na ion concentration (or other salts) at pH 7.0 to 8.3 and the temperature is at least about 30° C. for short probes (e.g., 10 to 50 nucleotide). Stringent conditions may also be achieved with the addition of destabilizing agents such as formamide.

[0047] The “percentage of sequence identity” or “sequence identity” is determined by comparing two optimally aligned sequences or subsequences over a comparison window or span, wherein the portion of the polynucleotide sequence in the comparison window may optionally comprise additions or deletions (i.e., gaps) as compared to the reference sequence (which does not comprise additions or deletions) for optimal alignment of the two sequences. The percentage is calculated by determining the number of positions at which the identical submit (e.g. nucleic acid base or amino acid residue) occurs in both sequences to yield the number of matched positions, dividing the number of matched positions by the total number of positions in the window of comparison and multiplying the result by 100 to yield the percentage of sequence identity. Percentage sequence identity when calculated using the programs GAP or BESTFIT (see below) is calculated using default gap weights.

[0048] Probe Design

[0049] One of skill in the art will appreciate that an enormous number of array designs are suitable for the practice of this invention. The high density array will typically include a number of probes that specifically hybridize to the sequences of interest. See WO 99/32660 for methods of producing probes for a given gene or genes. In addition, in a preferred embodiment, the array will include one or more control probes.

[0050] High density array chips of the invention include “test probes.” Test probes could be oligonucleotides that range from about 5 to about 500 or 5 to about 45 nucleotides, more preferably from about 10 to about 40 nucleotides and most preferably from about 15 to about 40 nucleotides in length. In other particularly preferred embodiments the probes are 20 or 25 nucleotides in length. In another preferred embodiment, test probes are double or single strand DNA sequences. DNA sequences are isolated or cloned from natural sources or amplified from natural sources using native nucleic acid as templates. These probes have sequences complementary to particular subsequences of the genes whose expression they are designed to detect. Thus, the test probes are capable of specifically hybridizing to the target nucleic acid they are to detect (the genes of Tables 1-5).

[0051] The term “perfect match probe” refers to a probe that has a sequence that is perfectly complementary to a particular target sequence. The probe is typically perfectly complementary to a portion (subsequence) of the target sequence. The perfect match (PM) probe can be a “test probe”, a “normalization control” probe, an expression level control probe and the like. A perfect match control or perfect match probe is, however, distinguished from a “mismatch control” or “mismatch probe.”

[0052] In addition to test probes that bind the target nucleic acid(s) of interest, the high density array can contain a number of control probes. The control probes fall into three categories referred to herein as 1) normalization controls; 2) expression level controls; and 3) mismatch controls.

[0053] Normalization controls are oligonucleotide or other nucleic acid probes that are complementary to labeled reference oligonucleotides or other nucleic acid sequences that are added to the nucleic acid sample to be screened. The signals obtained from the normalization controls after hybridization provide a control for variations in hybridization conditions, label intensity, “reading” efficiency and other factors that may cause the signal of a perfect hybridization to vary between arrays. In a preferred embodiment, signals (e.g., fluorescence intensity) read from all other probes in the array are divided by the signal (e.g. fluorescence intensity) from the control probes thereby normalizing the measurements.

[0054] Virtually any probe may serve as a normalization control. However, it is recognized that hybridization efficiency varies with base composition and probe length. Preferred normalization probes are selected to reflect the average length of the other probes present in the array, however, they can be selected to cover a range of lengths. The normalization control(s) can also be selected to reflect the (average) base composition of the other probes in the array, however in a preferred embodiment, only one or a few probes are used and they are selected such that they hybridize well (i.e., no secondary structure) and do not match any target-specific probes.

[0055] Expression level controls are probes that hybridize specifically with constitutively expressed genes in the biological sample. Virtually any constitutively expressed gene provides a suitable target for expression level controls. Typically expression level control probes have sequences complementary to subsequences of constitutively expressed “housekeeping genes” including, but not limited to an actin gene, the transferrin receptor gene, the GAPDH gene, and the like.

[0056] Mismatch controls or mismatch probes may also be provided for the probes to the target genes, for expression level controls or for normalization controls. Mismatch controls are oligonucleotide probes or other nucleic acid probes identical to their corresponding test or control probes except for the presence of one or more mismatched bases. A mismatched base is a base selected so that it is not complementary to the corresponding base in the target sequence to which the probe would otherwise specifically hybridize. One or more mismatches are selected such that under appropriate hybridization conditions (e.g., stringent conditions) the test or control probe would be expected to hybridize with its target sequence, but the mismatch probe would not hybridize (or would hybridize to a significantly lesser extent). Preferred mismatch probes contain a central mismatch. Thus, for example, where a probe is a 20 mer, a corresponding mismatch probe will have the identical sequence except for a single base mismatch (e.g., substituting a G, a C or a T for an A) at any of positions 6 through 14 (the central mismatch).

[0057] Mismatch probes thus provide a control for non-specific binding or cross hybridization to a nucleic acid in the sample other than the target to which the probe is directed. Mismatch probes also indicate whether a hybridization is specific or not. For example, if the target is present the perfect match probes should be consistently brighter than the mismatch probes. In addition, if all central mismatches are present, the mismatch probes can be used to detect a mutation. The difference in intensity between the perfect match and the mismatch probe provides a good measure of the concentration of the hybridized material.

[0058] Nucleic Acid Samples

[0059] As is apparent to one of ordinary skill in the art, nucleic acid samples used in the methods and assays of the invention may be prepared by any available method or process. Methods of isolating total mRNA are well known to those of skill in the art. For example, methods of isolation and purification of nucleic acids are described in detail in Chapter 3 of Laboratory Techniques in Biochemistry and Molecular Biology: Hybridization With Nucleic Acid Probes, Part I Theory and Nucleic Acid Preparation, P. Tijssen, Ed., Elsevier, N.Y. (1993). Such samples include RNA samples, but also include cDNA synthesized from a mRNA sample isolated from a cell or tissue of interest. Such samples also include DNA amplified from the cDNA, and RNA transcribed from the amplified DNA. One of skill in the art would appreciate that it is desirable to inhibit or destroy RNase present in homogenates before homogenates can be used.

[0060] Biological samples may be of any biological tissue or fluid or cells from any organism as well as cells raised in vitro, such as cell lines and tissue culture cells. Biological samples may also include sections of tissues, such as frozen sections or formalin fixed sections taken for histological purposes. Frequently, the sample will be a “clinical sample” which is a sample derived from a patient. Typical clinical samples include, but are not limited to prostate tissue, urine, sputum, blood, blood-cells (e.g., white cells or peripheral blood leukocytes (PBL), tissue or fine needle biopsy samples, peritoneal fluid, and pleural fluid, or cells therefrom.

[0061] Forming High Density Arrays

[0062] Methods of forming high density arrays of oligonucleotides with a minimal number of synthetic steps are known. The oligonucleotide analogue array can be synthesized on a solid substrate by a variety of methods, including, but not limited to, light-directed chemical coupling, and mechanically directed coupling. See Pirrung et al., U.S. Pat. No. 5,143,854.

[0063] In brief, the light-directed combinatorial synthesis of oligonucleotide arrays on a glass surface proceeds using automated phosphoramidite chemistry and chip masking techniques. In one specific implementation, a glass surface is derivatized with a silane reagent containing a functional group, e.g., a hydroxyl or amine group blocked by a photolabile protecting group. Photolysis through a photolithogaphic mask is used selectively to expose functional groups which are then ready to react with incoming 5′ photoprotected nucleoside phosphoramidites. The phosphoramidites react only with those sites which are illuminated (and thus exposed by removal of the photolabile blocking group). Thus, the phosphoramidites only add to those areas selectively exposed from the preceding step. These steps are repeated until the desired array of sequences have been synthesized on the solid surface. Combinatorial synthesis of different oligonucleotide analogues at different locations on the array is determined by the pattern of illumination during synthesis and the order of addition of coupling reagents.

[0064] In addition to the foregoing, additional methods which can be used to generate an array of oligonucleotides on a single substrate are described WO 93/09668. High density nucleic acid arrays can also be fabricated by depositing premade or natural nucleic acids in predetermined positions. Synthesized or natural nucleic acids are deposited on specific locations of a substrate by light directed targeting and oligonucleotide directed targeting. Another embodiment uses a dispenser that moves from region to region to deposit nucleic acids in specific spots.

[0065] Hybridization

[0066] Nucleic acid hybridization simply involves contacting a probe and target nucleic acid under conditions where the probe and its complementary target can form stable hybrid duplexes through complementary base pairing. See WO 99/32660. The nucleic acids that do not form hybrid duplexes are then washed away leaving the hybridized nucleic acids to be detected, typically through detection of an attached detectable label. It is generally recognized that nucleic acids are denatured by increasing the temperature or decreasing the salt concentration of the buffer containing the nucleic acids. Under low stringency conditions (e.g., low temperature and/or high salt) hybrid duplexes (e.g., DNA:DNA, RNA:RNA, or RNA:DNA) will form even where the annealed sequences are not perfectly complementary.

[0067] Thus specificity of hybridization is reduced at lower stringency. Conversely, at higher stringency (e.g., higher temperature or lower salt) successful hybridization tolerates fewer mismatches. One of skill in the art will appreciate that hybridization conditions may be selected to provide any degree of stringency. In a preferred embodiment, hybridization is performed at low stringency in this case in 6×SSPE-T at 37° C. (0.005% Triton X-100) to ensure hybridization and then subsequent washes are performed at higher stringency (e.g., I×SSPE-T at 37° C.) to eliminate mismatched hybrid duplexes. Successive washes may be performed at increasingly higher stringency (e.g., down to as low as 0.25 ×SSPET at 37° C. to 50° C.) until a desired level of hybridization specificity is obtained. Stringency can also be increased by addition of agents such as formamide. Hybridization specificity may be evaluated by comparison of hybridization to the test probes with hybridization to the various controls that can be present (e.g., expression level control, normalization control, mismatch controls, etc.).

[0068] In general, there is a tradeoff between hybridization specificity (stringency) and signal intensity. Thus, in a preferred embodiment, the wash is performed at the highest stringency that produces consistent results and that provides a signal intensity greater than approximately 10% of the background intensity. Thus, in a preferred embodiment, the hybridized array may be washed at successively higher stringency solutions and read between each wash. Analysis of the data sets thus produced will reveal a wash stringency above which the hybridization pattern is not appreciably altered and which provides adequate signal for the particular oligonucleotide probes of interest.

[0069] Signal Detection

[0070] The hybridized nucleic acids are typically detected by detecting one or more labels attached to the sample nucleic acids. The labels may be incorporated by any of a number of means well known to those of skill in the art. See WO 99/32660.

[0071] Databases

[0072] The present invention includes relational databases containing sequence information, for instance for the genes of Tables 1-5, as well as gene expression information in various prostate tissue samples. Databases may also contain information associated with a given sequence or tissue sample such as descriptive information about the gene associated with the sequence information, metabolic pathway information for the gene or descriptive information concerning the clinical status of the tissue sample, or the patient from which the sample was derived. Such information for the patient may include, but is not limited to sex, age, disease status, general health information, surgical or treatment status, PSA levels, as well as information concerning the patient's clinical symptoms. The database may be designed to include different parts, for instance a sequence database and a gene expression database. Methods for the configuration and construction of such databases are widely available, for instance, see U.S. Pat. No. 5,953,727, which is herein incorporated by reference in its entirety.

[0073] The databases of the invention may be linked to an outside or external database. In a preferred embodiment, as described in Tables 1-5, the external database is GenBank and the associated databases maintained by the National Center for Biotechnology Information (NCBI).

[0074] Any appropriate computer platform may be used to perform the necessary comparisons between sequence information, gene expression information and any other information in the database or provided as an input. For example, a large number of computer workstations are available from a variety of manufacturers, such has those available from Silicon Graphics. Client/server environments, database servers and networks are also widely available and appropriate platforms for the databases of the invention.

[0075] The databases of the invention may be used to produce, among other things, electronic Northerns that allow the user to determine the cell type or tissue in which a given gene is expressed and to allow determination of the abundance or expression level of a given gene in a particular tissue or cell.

[0076] The databases of the invention may also be used to present information identifying the expression level in a tissue or cell of a set of genes comprising at least two of the genes in Tables 1-5, comprising the step of comparing the expression level of at least one gene in Tables 1-5 found or detected in the tissue to the level of expression of the gene in the database. Such methods may be used to predict the hyperplastic state of a given tissue by comparing the level of expression of a gene or genes in Tables 1-5 from a sample to the expression levels found in normal prostate cells, BPH cells or tissue and/or malignant or cancerous prostate tissue. Such methods may also be used in the drug or agent screening assays as described below.

[0077] Selection of BPH-Associated Genes

[0078] BPH associated genes may be identified or selected by any available method, including subtractive hybridization protocols, differential display protocols and high-throughput hybridization formats, including oligonucleotide and cDNA microarray technologies.

[0079] Unprocessed or raw expression levels may be normalized, standardized and/or analyzed by any available computational method, including the expression level normalization, analysis and clustering methods herein described. The normalization method as described in Example 4 may be combined with any further analysis method, including any clustering methods available in the art.

[0080] Diagnostic Uses for the BPH Markers

[0081] As described above, the genes and gene expression information provided in Tables 1-5 may be used as diagnostic markers for the prediction or identification of the hyperplastic state of a prostate or other tissue. For instance, a prostate tissue or other patient sample may be assayed by any of the methods described above, and the expression levels from a gene or genes from Tables 1-5 may be compared to the expression levels found in normal prostate tissue, BPH tissue or BPH tissue from a patient with metastatic or nonmetastatic prostate cancer. In some instances, patient PBLs may be used as the patient sample. The comparison of expression data, as well as available sequence or other information may be done by researcher or diagnostician or may be done with the aid of a computer and databases as described above.

[0082] Use of the BPH Markers for Monitoring Disease Progression

[0083] As described above, the genes and gene expression information provided in Tables 1-5 may also be used as markers for the monitoring of disease progression, such as the development of BPH. For instance, a prostate tissue or other patient sample may be assayed by any of the methods described above, and the expression levels from a gene or genes from Tables 1-5 may be compared to the expression levels found in normal prostate tissue, BPH tissue or BPH tissue from a patient with metastatic or nonmetastatic prostate cancer. The comparison of the expression data, as well as available sequence or other information may be done by researcher or diagnostician or may be done with the aid of a computer and databases as described above.

[0084] The BPH markers of the invention may also be used to track or predict the progress or efficacy of a treatment regime in a patient. For instance, a patient's progress or response to a given drug may be monitored by creating a gene expression profile from a tissue or cell sample after treatment or administration of the drug. The gene expression profile may then be compared to a gene expression profile prepared from normal cells or tissue, for instance, normal prostate tissue. The gene expression profile may also be compared to a gene expression profile prepared from BPH or malignant prostate cells, or from tissue or cells from the same patient before treatment. The gene expression profile may be made from at least one gene, preferably more than one gene, and most preferably all or nearly all of the genes in Tables 1-5.

[0085] Use of the BPH Markers for Drug Screening

[0086] According to the present invention, the genes identified in Tables 1-5 can be used as markers to screen for potential therapeutic agents or compounds to treat BPH or prostate cancer. A candidate drug or agent can be screened for the ability to stimulate the transcription or expression of a given marker or to down-regulate or counteract the transcription or expression of a marker or markers. Compounds that modulate the expression level of single gene and also compounds that modulate the expression level of multiple genes from levels associated with a specific disease state to a normal state can be screened by using the markers and profiles identified herein.

[0087] According to the present invention, one can also compare the specificity of drug's effects by looking at the number of markers which are differentially expressed after drug exposure and comparing them. More specific drugs will have less transcriptional targets. Similar sets of markers identified for two drugs may indicate a similarity of effects.

[0088] Assays to monitor the expression of a marker or markers as defined in Tables 1-5 may utilize any available means of monitoring for changes in the expression level of the nucleic acids of the invention. As used herein, an agent is said to modulate the expression of a nucleic acid of the invention if it is capable of up- or down-regulating expression of the nucleic acid in a cell.

[0089] In one assay format, gene chips containing probes to at least 2 genes from Tables 1-5 may be used to directly monitor or detect changes in gene expression in the treated or exposed cell as described in more detail above. In another format, the changes of mRNA expression level can be detected using QuantiGene technology (Warrior et. al. (2000) J. Biomolecular Screening, 5, 343-351). Specific probes used for QuantiGene can be designed and synthesized to one or more genes from Tables 1-5. Cells treated with compounds are lysed by lysis buffer. The amount of target mRNA can be detected as a luminescence intensity using target specific probes

[0090] In another format, cell lines that contain reporter gene fusions between the open reading frame and/or 5′/3′ regulatory regions of a gene in Tables 1-5 and any assayable fusion partner may be prepared. Numerous assayable fusion partners are known and readily available including the firefly luciferase gene and the gene encoding chloramphenicol acetyltransferase (Alam et al. (1990) Anal. Biochem. 188:245-254). Cell lines containing the reporter gene fusions are then exposed to the agent to be tested under appropriate conditions and time. Differential expression of the reporter gene between samples exposed to the agent and control samples identifies agents which modulate the expression of the nucleic acid.

[0091] Additional assay formats may be used to monitor the ability of the agent to modulate the expression of a gene identified in Tables 1-5. For instance, as described above, mRNA expression may be monitored directly by hybridization of probes to the nucleic acids of the invention. Cell lines are exposed to the agent to be tested under appropriate conditions and time and total RNA or mRNA is isolated by standard procedures such those disclosed in Sambrook et al. (Molecular Cloning: A Laboratory Manual, 2nd Ed. Cold Spring Harbor Laboratory Press, 1989).

[0092] In another assay format, cells or cell lines are first identified which express the gene products of the invention physiologically (see below). Cell and/or cell lines so identified would be expected to comprise the necessary cellular machinery such that the fidelity of modulation of the transcriptional apparatus is maintained with regard to exogenous contact of agent with appropriate surface transduction mechanisms and/or the cytosolic cascades. Such cell lines may be, but are not required to be, prostate derived. Further, such cells or cell lines may be transduced or transfected with an expression vehicle (e.g., a plasmid or viral vector) construct comprising an operable non-translated 5′-promoter containing end of the structural gene encoding the instant gene products fused to one or more antigenic fragments, which are peculiar to the instant gene products, wherein said fragments are under the transcriptional control of said promoter and are expressed as polypeptides whose molecular weight can be distinguished from the naturally occurring polypeptides or may further comprise an immunologically distinct tag or some other detectable marker or tag. Such a process is well known in the art (see Maniatis).

[0093] Cells or cell lines transduced or transfected as outlined above are then contacted with agents under appropriate conditions; for example, the agent comprises a pharmaceutically acceptable excipient and is contacted with cells comprised in an aqueous physiological buffer such as phosphate buffered saline (PBS) at physiological pH, Eagles balanced salt solution (BSS) at physiological pH, PBS or BSS comprising serum or conditioned media comprising PBS or BSS and/or serum incubated at 37° C. Said conditions may be modulated as deemed necessary by one of skill in the art. Subsequent to contacting the cells with the agent, said cells are disrupted and the polypeptides of the lysate are fractionated such that a polypeptide fraction is pooled and contacted with an antibody to be further processed by immunological assay (e.g., ELISA, immunoprecipitation or Western blot). The pool of proteins isolated from the “agent-contacted” sample is then compared with a control sample where only the excipient is contacted with the cells and an increase or decrease in the immunologically generated signal from the “agent-contacted” sample compared to the control is used to distinguish the effectiveness of the agent.

[0094] Another embodiment of the present invention provides methods for identifying agents that modulate at least one activity of a protein(s) encoded by the genes in Tables 1-5. Such methods or assays may utilize any means of monitoring or detecting the desired activity.

[0095] In one format, the relative amounts of a protein of the invention between a cell population that has been exposed to the agent to be tested compared to an unexposed control cell population may be assayed. In this format, probes such as specific antibodies are used to monitor the differential expression of the protein in the different cell populations. Cell lines or populations are exposed to the agent to be tested under appropriate conditions and time. Cellular lysates may be prepared from the exposed cell line or population and a control, unexposed cell line or population. The cellular lysates are then analyzed with the probe, such as a specific antibody.

[0096] Agents that are assayed in the above methods can be randomly selected or rationally selected or designed. As used herein, an agent is said to be randomly selected when the agent is chosen randomly without considering the specific sequences involved in the association of the a protein of the invention alone or with its associated substrates, binding partners, etc. An example of randomly selected agents is the use a chemical library or a peptide combinatorial library, or a growth broth of an organism.

[0097] As used herein, an agent is said to be rationally selected or designed when the agent is chosen on a nonrandom basis which takes into account the sequence of the target site and/or its conformation in connection with the agent's action. Agents can be rationally selected or rationally designed by utilizing the peptide sequences that make up these sites. For example, a rationally selected peptide agent can be a peptide whose amino acid sequence is identical to or a derivative of any functional consensus site.

[0098] The agents of the present invention can be, as examples, peptides, small molecules, vitamin derivatives, as well as carbohydrates. Dominant negative proteins, DNAs encoding these proteins, antibodies to these proteins, peptide fragments of these proteins or mimics of these proteins may be introduced into cells to affect function. “Mimic” used herein refers to the modification of a region or several regions of a peptide molecule to provide a structure chemically different from the parent peptide but topographically and functionally similar to the parent peptide (see Grant G A. in: Meyers (ed.) Molecular Biology and Biotechnology (New York, VCH Publishers, 1995), pp. 659-664). A skilled artisan can readily recognize that there is no limit as to the structural nature of the agents of the present invention.

[0099] Cells Used for Multi Gene Screening

[0100] Many kinds of cells such as primary cells and cell lines can be used for the drug screening methods of the invention. Cells or cell lines derived from prostatic tissues are preferred because the innate gene expression mechanisms of these cells often resemble those of prostatic tissues. Cells used for drug screening can be selected by assaying for the expression of one or more of the marker genes listed in Tables 1-5. The cells which differentially express one or more, or preferably nearly all of the marker genes listed in Tables 1-5 are preferred cells or cell lines for the methods of the invention (see Table 6).

[0101] Kits

[0102] The invention further includes kits combining, in different combinations, high-density oligonucleotide arrays, reagents for use with the arrays, signal detection and array-processing instruments, gene expression databases and analysis and database management software described above. The kits may be used, for example, to diagnose the disease state of a tissue or cell sample, to monitor the progression of prostate disease states, to identify genes that show promise as new drug targets and to screen known and newly designed drugs as discussed above.

[0103] The databases packaged with the kits are a compilation of expression patterns from human and laboratory animal genes and gene fragments (corresponding to the genes of Tables 1-5). In particular, the database software and packaged information include the expression results of Tables 1-5 that can be used is the assays and methods as herein described.

[0104] The kits may used in the pharmaceutical industry, where the need for early drug testing is strong due to the high costs associated with drug development, but where bioinformatics, in particular gene expression informatics, is still lacking. These kits will reduce the costs, time and risks associated with traditional new drug screening using cell cultures and laboratory animals. The results of large-scale drug screening of pre-grouped patient populations, pharmacogenomics testing, can also be applied to select drugs with greater efficacy and fewer side-effects. The kits may also be used by smaller biotechnology companies and research institutes who do not have the facilities for performing such large-scale testing themselves.

[0105] Databases and software designed for use with use with microarrays is discussed in Balaban et al., U.S. Pat. Nos. 6,229,911, a computer-implemented method for managing information, stored as indexed tables, collected from small or large numbers of microarrays, and 6,185,561, a computer-based method with data mining capability for collecting gene expression level data, adding additional attributes and reformatting the data to produce answers to various queries. Chee et al., U.S. Pat. No. 5,974,164, disclose a software-based method for identifying mutations in a nucleic acid sequence based on differences in probe fluorescence intensities between wild type and mutant sequences that hybridize to reference sequences

[0106] Without further description, it is believed that one of ordinary skill in the art can, using the preceding description and the following illustrative examples, make and utilize the genes, chips, etc. of the present invention and practice the claimed methods. The following working examples therefore, specifically point out the preferred embodiments of the present invention, and are not to be construed as limiting in any way the remainder of the disclosure.

### EXAMPLES

### Example 1

### Gene Chip Expression Analysis

[0107] BPH, normal prostate tissue, and prostate tissue adjacent to malignant prostate tissue were obtained from human biopsy samples.

[0108] Microarray sample preparation was conducted with minor modifications, following the protocols set forth in the Affymetrix GeneChip Expression Analysis Manual. Frozen tissue was ground to a powder using a Spex Certiprep 6800 Freezer Mill. Total RNA was extracted with Trizol (GibcoBRL) utilizing the manufacturer's protocol. The total RNA yield for each sample was 200-500 μg per 300 mg tissue weight. mRNA was isolated using the Oligotex mRNA Midi kit (Qiagen) followed by ethanol precipitation. Double stranded cDNA was generated from mRNA using the SuperScript Choice system (GibcoBRL). First strand cDNA synthesis was primed with a T7-(dT24) oligonucleotide. The cDNA was phenol-chloroform extracted and ethanol precipitated to a final concentration of 1 μg/ml. From 2 μg of cDNA, cRNA was synthesized using Ambion's T7 MegaScript in vitro Transcription Kit.

[0109] To biotin label the cRNA, nucleotides Bio-11-CTP and Bio-16-UTP (Enzo Diagnostics) were added to the reaction. Following a 37° C. incubation for six hours, impurities were removed from the labeled cRNA following the RNeasy Mini kit protocol (Qiagen). cRNA was fragmented (fragmentation buffer consisting of 200 mM Tris-acetate, pH 8.1, 500 mM KOAc, 150 mM MgOAc) for thirty-five minutes at 94° C. Following the Affymetrix protocol, 55 μg of fragmented cRNA was hybridized on the Affymetrix Human 42K array set for twenty-four hours at 60 rpm in a 45° C. hybridization oven. The chips were washed and stained with Streptavidin Phycoerythrin (SAPE) (Molecular Probes) in Affymetrix fluidics stations. To amplify staining, SAPE solution was added twice with an anti-streptavidin biotinylated antibody (Vector Laboratories) staining step in between. Hybridization to the probe arrays was detected by fluorometric scanning (Hewlett Packard Gene Array Scanner). Data was analyzed using Affymetrix GeneChip version 3.0 and Expression Data Mining Tool (EDMT) software (version 1.0).

[0110] Differential expression of genes between the BPH and normal prostate samples were determined using the Affymetrix GeneChip human gene chip set by the following criteria: 1) For each gene, Affymetrix GeneChip average difference values were determined by standard Affymetrix EDMT software algorithms, which also made “Absent” (=not specifically detected as gene expression), “Present” (=detected) or “Marginal” (=not clearly Absent or Present) calls for each GeneChip element; 2) all AveDiff values which were less than +20 (positive 20) were raised to a floor of +20 so that fold change calculations could be made where values were not already greater than or equal to +20; 3) median levels of expression were compared between the normal control group and the BPH with symptoms disease group to obtain greater than or equal 2-fold up/down values; 4) The median value for the higher expressing group needed to be greater or equal to 200 average difference units in order to be considered for statistical significance; 5) Genes passing the criteria of #1-4 were analyzed for statistical significance using a two-tailed T test and deemed statistically significant if p<0.05. Tables 1 and 2 list the genes and their levels of differential expression (compared to normal samples) in BPH tissue from patients with symptoms of BPH and in BPH tissue immediately adjacent to malignant prostate tissue isolated from male patients.

### Example 2

### Expression Profile Analysis

[0111] Gene expression profiles between normal sample and BPH patient samples were determined by using the following samples: 10 normal; 7 BPH without symptoms; 8 BPH with cancer; and 8 BPH with symptoms. Gene expression profiles were prepared using the 42K Affymetrix Gene Chip set. The methods used were the same as described in Example 1 with the exception of the criteria to select the marker genes.

[0112] The criteria used in this study were as follows; 1) For each gene, Affymetrix GeneChip average difference values were determined by standard Affymetrix EDMT software algorithms, which also made “Absent” (=not specifically detected as gene expression), “Present” (=detected) or “Marginal” (=not clearly Absent or Present) calls for each GeneChip element; 2) all AveDiff values which were less than +20 (positive 20) were raised to a floor of +20 so that fold change calculations could be made where values were not already greater than or equal to +20; 3) mean levels of expression were compared between the normal control group and the BPH with symptoms disease group; 4) genes were arranged by the fold change starting with the largest one (Fold change calculation was determined by using, logarithmic values in Example 2); and 5) the top 200 up-regulated genes and bottom 200 down-regulated genes were selected. The genes identified in this study are listed in Tables 3 (normal vs. BPH with symptoms, up regulated) and 4 (normal vs. BPH with symptoms, down regulated, values are negative fold-change from normal).

### Example 3

### Selection of Cell Lines Used for Multi Gene Screening

[0113] A number of cultured cell lines were tested to determine the similarity in gene expression profiles to BPH tissue. Cells were cultured in 6-well plates using the appropriate medium for each cell line. After reaching 90% confluency, cells were lysed with Trizol (GiboBRL) and total RNA was extracted. mRNA was then isolated, cDNA and cRNA was synthesized, and gene expression levels were determined by the Affymetrix Human 42K Gene Chip set as described in more detail above.

[0114] The gene expression profiles were compared with those of prostatic tissue samples. A panel of 61 genes whose expression levels were up-regulated in BPH with symptoms compared with normal samples and with small variation among samples (within BPH samples and within normal samples) were assayed. The number of genes whose signal intensity was more than 100 in each cell line is summarized in Table 6. A panel of 43 genes whose expression levels were down-regulated in BPH patient with small variation among samples was also assayed. The number of genes whose signal intensity-in Affymetrix Gene Chip was “Present call” is also included in Table 6.

[0115] Forty-eight to 58% of genes applied for this analysis were expressed in the cell lines of Table 6. These results indicate that cell lines, BRF-55T (Biological Research Faculty & Facility Inc.), PZ-HPV7 (ATCC; CRL-2221), BPH-1 (S. W. Hayward et al., In Vitro Cell Dev. Biol. 31A, 14-24, 1995) and LNCaP (ATCC; CRL-1740) can be used as a BPH-like cell population to screen for compounds which are capable of modulating gene expression profiles from the disease state to a normal state. In particular, BRF-55T is a useful cell line for screening in the assays of the invention, because 58% genes of the assayed genes were differentially expressed in BRF-55T as compared to BPH with symptoms tissue.

### Example 4

### Cluster Analysis of Up- or Down-Regulated Genes in BPH

[0116] Cluster analysis of the expression results from a large number of genes is often problematic due to variations in the standardization of the gene expression data. To compensate for these variations, a subset of differentially expressed genes was selected by a modified analysis procedure.

[0117] In a first step, a gene list comparing normal vs. disease samples was generated by two kinds of comparisons. First, genes were selected that displayed a greater than or equal to mean 2-fold up or down regulation using average difference expression values and with p<0.05. Second, genes were selected by ANOVA comparing the normal group of samples with the disease group and with a t value of >3 in the up or down direction. These lists were then combined to create an expression profile characteristic of normal controls and one characteristic of disease in which specific genes are found to be up or down regulated in disease when compared with normal controls.

[0118] In preparation for clustering analysis to identify subgroups of genes that show statistically similar expression patterns, average difference values for the selected genes were normalized across all samples (normal and disease combined) using the following formula:

Normalization data=(X−Xmean)/Sx

[0119] Where Sx is variance (:STD)

[0120] This converts the mean expression value for each gene to 0 and the high and low values to 1 and −1, respectively. Thus, genes with high absolute expression values when compared with genes with low absolute expression values would not skew the comparisons when clustering algorithms are applied.

[0121] The measurement of the cluster space distance was determined by using the correlation coefficient (1−r) method and clustering was performed using Ward's method (Ward,J. H. (1963) Journal of American Statistical Association, 58. 236.)

[0122] The clustering was validated by observing whether multiple elements representing the same genes showing the same direction of expression change (i.e., either up or down) tend to cluster together. To test this standardization and clustering protocol, the expression levels for genes that are represented by more than one element on the 42K gene chip set were analyzed to determine whether the multiple elements for a single gene could be clustered together. For example, tryptase, also known as alpha tryptase or beta (tryptase II) is represented by two separate elements on the 42K human gene chip. This gene is registered with 2 different element names 41268 (5), M33493_s_at (code name, Up-170) and 26389 (3), rc_AA131322_s_at (code name, Up-010).

[0123] It was found that the best analysis means for decreasing measurement errors between these two elements is by the Ward method as it gave the most consistent results when compared to other clustering methods. These analysis methods may be incorporated into software or computer readable storage media for storing a computer programmer software.

### Example 5

### Selection of 60 Marker Genes

[0124] A panel of 60 representative marker genes (listed in Table 5) out of 400 marker genes listed in Tables 3 and 4 can be used in the assays and methods of the invention. The 60 marker genes were selected based on following criteria: (1) expression level is changed greatly in BPH patient samples compared with normal samples; (2) variation of expression levels within BPH samples and within normal samples is small; and (3) expression levels resembling BPH with symptoms are detected in cell line BRF-55T.

### Example 6

### Gene Expression Analysis of Select Genes

[0125] The expression levels of three genes from Tables 1-5 (the genes encoding cellular retinol binding protein, S100 calcium binding protein and PSMA) were assayed in various tissues and prostate samples by PCR as described in Example 7 (see FIGS. 1-6). Each sample was assayed for the level of GAPDH and mRNA corresponding to cellular retinol binding protein, S100 calcium binding protein or PSMA. As seen in FIGS. 1-6, these three genes are differentially regulated or expressed in BPH tissue from patients with or without symptoms and from BPH tissue from patients with prostate cancer (compared to normal prostate tissue). All three genes are therefore useful markers in the assays of the invention, such as the assays to measure the effect of an agent on BPH or the assays to detect or diagnose the occurrence or progression of BPH.

### Example 7

### Drug Screening Assays

[0126] The expression profiles for normal controls and disease samples described above can be used to identify compound hits from a compound library. A hit may be defined as one of three kinds of results:

[0127] 1) The expression of an individual gene is changed in the direction of normal (i.e., if up in disease, then down=hit, if down in disease, then up=hit). The stronger the modulation of an individual gene to a normal phenotype, the stronger the hit status for the compound against that gene.

[0128] 2) The expression of genes that subcluster together is evaluated for an overall pattern of modulation to a normal expression profile. The more genes in a subcluster that are modulated to a normal phenotype, the stronger the hit status for the compound against that subcluster. A subcluster may represent common or interacting cellular pathways.

[0129] 3) The overall expression profile of all of the genes being screened is evaluated for modulation to normal. The more genes that are modulated to a normal phenotype, the stronger the hit status for the compound against the entire gene set.

[0130] As described above, if a compound modulates the gene expression pattern of the screening system cells more towards any disease phenotype, then it can be used as a molecular probe to find binding proteins and/or define disease-associated cellular pathways.

[0131] As an example, candidate agents and compounds are screened for their ability to modulate the expression levels of cellular retinol binding protein, S100 calcium binding protein and PSMA by exposing a prostate cell line or cell line from BPH tissue to the agent and assaying the expression levels of these genes by real time PCR. Real time PCR detection is accomplished by the use of the ABI PRISM 7700 Sequence Detection System. The 7700 measures the fluorescence intensity of the sample each cycle and is able to detect the presence of specific amplicons within the PCR reaction. Each sample is assayed for the level of GAPDH and mRNA corresponding to cellular retinol binding protein, S100 calcium binding protein and PSMA. GAPDH detection is performed using Perkin Elmer part#402869 according to the manufacturer's directions. Primers were designed for the three genes by using Primer Express, a program developed by PE to efficiently find primers and probes for specific sequences ((1) N91971—FAM PROBE Forward: 5′- CAT ggC TTT gTT TTA AgA AAA ggA A -3′; Reverse: 5′-AgC CAC CCC CAg gCA T-3′; Probe: 5′-FAM-AgT gAC AAA gCC AAg AgA CAg ACT CTg CTA ACA-TAMRA-3′; (2) X65614—SYBR; Forward: 5′-AAA gAC AAg gAT gCC gTg gAT-3′; Reverse 5′-AgC CAC gAA CAC gAT gAA CTC-3′; (3) M99487—SYB; Forward 5′-Tgg CTC AgC ACC ACC Aga T-3′; Reverse: 5′-TTC Cag TAA AgC Cag gTC CAA-3′)

[0132] These primers are used in conjunction with SYBR green (Molecular Probes), a nonspecific double stranded DNA dye, to measure the expression level mRNA corresponding to the genes, which is normalized to the GAPDH level in each sample.

[0133] Normalized expression levels from cells exposed to the agent are then compared to the normalized expression levels in control cells. Agents that modulate the expression of one or more the genes may be further tested as drug candidates in appropriate BPH in vitro or in vivo models.

### Example 8

### Diagnostic Assays

[0134] The expression profiles or one or more of the individual genes of Tables 1-5 are used as molecular or diagnostic markers to evaluate the disease status of a patient sample. In one embodiment, a patient prostate tissue sample is processed as described herein to produce total cellular or mRNA. The RNA is hybridized to a chip continuing probes that specifically hybridize to one or more, or two or more of the genes in Tables 1-5. The overall expression profile generated, or the expression levels of individual genes are then compared to the profiles as described in Tables 1-5 to determine the disease or hyperplastic state of the patient sample.

[0135] Although the present invention has been described in detail with reference to examples above, it is understood that various modifications can be made without departing from the spirit of the invention. Accordingly, the invention is limited only by the following claims. All cited patents, applications, GenBank Accession numbers and publications referred to in this application are herein incorporated by reference in their entirety.

TABLE 1
Normal1-Normal2 vs BPH-With Symptoms TABLE

| | | | Genbank | Fold-change | p-value |
|---|---|---|---|---|---|
| | Affy element | Genbank ID | Name | N1-N2 vs With | N1-N2 vs With |
| up-regulated | RC_AA410383_at | AA410383 | B-cell-homing chemokine (ligand for | 22.5 | 0.025197485 |
| | | | Burkitt's lymphoma receptor-1)4q21 | | |
| | RC_AA463726_s_at | AA463726 | JM27 proteinXp11.23 | 14.9 | 0.018598344 |
| | RC_AA057195_at | AA057195 | Homo sapiens mRNA; cDNA DKFZp586M121 | 14.0 | 0.029325045 |
| | | | (from clone DKFZp586M121) | | |
| | V01512_rna1_at | V01512_rna1 | v-fos FBJ murine osteosarcoma viral | 13.1 | 0.001027561 |
| | | | oncogene homolog14q24.3 | | |
| | RC_AA427622_s_at | AA427622 | collagen, type XIII, alpha 110q22 | 11.6 | 0.00074954 |
| | RC_N23730_s_at | N23730 | v-fos FBJ murine osteosarcoma viral | 11.4 | 0.000631487 |
| | | | oncogene homolog14q24.3 | | |
| | RC_AA465491_at | AA465491 | Mad4 homolog4p16.3 | 11.4 | 0.031024189 |
| | RC_AA620825_at | AA620825 | ESTs | 11.3 | 0.010915901 |
| | RC_R93908_at | R93908 | ESTs | 11.3 | 0.019994337 |
| | RC_AA461300_at | AA461300 | ESTs | 11.0 | 0.007061759 |
| | N40141_at | N40141 | JM27proteinXp11.23 | 10.9 | 0.013756347 |
| | RC_R25410_at | R25410 | ESTs | 7.7 | 0.01851753 |
| | L49169_at | L49169 | FBJ murine osteosarcoma viral | 7.4 | 0.041523744 |
| | | | oncogene homolog B19q13.3 | | |
| | RC_AA279760_at | AA279760 | ESTs | 7.0 | 0.024411468 |
| | RC_T90889_at | T90889 | ESTs | 6.5 | 0.015666863 |
| | U62015_at | U62015 | insulin-like growth factor binding | 6.0 | 0.002843661 |
| | | | protein 101p22-p31 | | |
| | RC_AA188981_at | AA188981 | highly expressed in cancer, rich in | 5.9 | 0.002280479 |
| | | | leucine heptad repeats | | |
| | D83018_at | D83018 | nel (chicken)-like 212q13.11-q13.12 | 5.6 | 0.000570952 |
| | RC_H64493_f_at | H64493 | immunoglobulin gamma 3 (Gm marker) | 5.6 | 0.01109802 |
| | | | 14q32.33 | | |
| | X52541_at | X52541 | early growth response 15q31.1 | 5.2 | 0.002428259 |
| | M57466_s_at | M57466 | major histocompatibility complex, | 5.1 | 0.002137399 |
| | | | class II, DP beta 16p21.3 | | |
| | J03507_at | J03507 | complement component 75p13 | 4.9 | 1.36616E−05 |
| | RC_N30198_at | N30198 | ESTs | 4.8 | 0.003366461 |
| | RC_T78398_at | T78398 | EST | 4.8 | 0.033293747 |
| | RC_H17550_at | H17550 | ESTs | 4.7 | 0.047828622 |
| | RC_T67053_f_at | T67053 | immumoglobulin lambda gene | 4.5 | 0.045107075 |
| | | | cluster22q11.1-q11.2 | | |
| | RC_AA598982_s_at | AA598982 | trophininXp11.22-p11.21 | 4.3 | 0.000902336 |
| | RC_AA256268_at | AA256268 | ESTs | 4.2 | 0.001506239 |
| | HG3543-HT3739_at | M29645 | insulin-like growth factor 2 | 4.1 | 0.017253126 |
| | | | (somatomedin A)11p15.5 | | |
| | RC_N91971_f_at | N91971 | retinol-binding protein 1, | 4.1 | 0.02528773 |
| | | | cellular3q23 | | |
| | RC_AA479286_at | AA479286 | ESTs | 4.0 | 0.028009544 |
| | M62831_at | M62831 | immediate early protein 19 | 4.0 | 0.000484086 |
| | RC_F02992_at | F02992 | ESTs, Weakly similar to unknown | 3.9 | 0.031845412 |
| | | | [M.musculus] | | |
| | RC_H86112_f_at | H86112 | KIAA0471 gene product1q24-q25 | 3.8 | 0.004155259 |
| | RC_AA436616_at | AA436616 | ESTs | 3.8 | 0.017156387 |
| | RC_T62857_at | T62857 | ESTs | 3.7 | 0.000301735 |
| | RC_AA281345_f_at | AA281345 | immediate early protein19 | 3.6 | 0.001679723 |
| | U21128_at | U21128 | lumican 12q21.3-q22 | 3.6 | 2.19529E−05 |
| | U30521_at | U30521 | P311 protein | 3.6 | 0.001150397 |
| | RC_N58172_at | N58172 | ESTs | 3.5 | 0.043092144 |
| | RC_T03229_f_at | T03229 | EST | 3.5 | 0.031101935 |
| | X06700_s_at | X06700 | collagen, type III, alpha 1 | 3.5 | 0.008472599 |
| | | | (Ehlers-Danlos syndrome type IV, | | |
| | | | autosomal dominant | | |
| | RC_Z39904_at | Z39904 | Homo sapiens clone 23555 mRNA | 3.4 | 0.002949046 |
| | | | sequence | | |
| | RC_T23622_at | T23622 | ESTs | 3.4 | 0.002174281 |
| | J00231_f_at | J00231 | immunoglobulin gamma 3 (Gm marker) | 3.4 | 0.009322568 |
| | | | 14q32.33 | | |
| | RC_AA028092_s_at | AA028092 | transcription factor 216pter-qter | 3.4 | 3.13963E−06 |
| | RC_AA252528_at | AA252528 | ESTs | 3.4 | 0.000225707 |
| | L33799_at | L33799 | procollagen C-endopeptidase | 3.3 | 0.018469201 |
| | | | enhancer7q22 | | |
| | RC_F09748_s_at | F09748 | Homo sapiens mRNA; cDNA | 3.2 | 0.02728166 |
| | | | DKFZp586K1220 (from clone | | |
| | | | DKFZp586K1220) | | |
| | RC_T64223_s_at | T64223 | carboxypeptidase A3 (mast cell) | 3.2 | 0.027915742 |
| | | | 3q21-q25 | | |
| | RC_AA402903_f_at | AA402903 | immunoglobulin gamma 3 (Gm marker) | 3.2 | 0.044721116 |
| | | | 14q32.33 | | |
| | RC_F13763_at | F13763 | ESTs | 3.1 | 0.000503701 |
| | RC_AA488432_at | AA488432 | phosphoserine phosphatase7p21-p15 | 3.1 | 0.020997503 |
| | RC_AA486072_i_at | AA486072 | small inducible cytokine A5 (RANTES) | 3.1 | 0.025877597 |
| | | | 17q11.2-q12 | | |
| | RC_N22006_s_at | N22006 | EST | 3.1 | 0.00148561 |
| | RC_AA257093_r_at | AA257093 | T-cell receptor, beta cluster7q35 | 3.1 | 1.71945E−07 |
| | RC_AA609943_at | AA609943 | ESTs | 3.0 | 0.029360518 |
| | RC_T23490_s_at | T23490 | ESTs | 3.0 | 0.008741411 |
| | D13628_at | D13628 | angiopoietin 18q22.3-q23 | 2.9 | 0.006228419 |
| | M73720_at | M73720 | carboxypeptidase A3 (mast cell) | 2.9 | 0.006585391 |
| | | | 3q21-q25 | | |
| | Z74616_s_at | Z74616 | collagen, type I, alpha 27q22.1 | 2.8 | 0.008750622 |
| | AA082546_at | AA082546 | ESTs | 2.8 | 0.019771126 |
| | RC_AA284920_at | AA284920 | ESTs | 2.7 | 0.019738239 |
| | RC_AA599365_at | AA599365 | decorin12q23 | 2.7 | 0.001295936 |
| | X57025_at | X57025 | insulin-like growth factor 1 | 2.7 | 0.022341194 |
| | | | (somatomedin C)12q22-q23 | | |
| | X51345_at | X51345 | jun B proto-oncogene19p13.2 | 2.7 | 0.036487159 |
| | RC_N67876_s_at | N67876 | insulin-like growth factor 1 | 2.7 | 0.035216134 |
| | | | (somatomedin C)12q22-q23 | | |
| | RC_AA609504_at | AA609504 | KIAA0405 gene product | 2.7 | 0.020881055 |
| | RC_N69207_at | N69207 | ESTs, Moderately similar to | 2.6 | 0.041315387 |
| | | | !!!! ALU SUBFAMILY SB2 | | |
| | | | WARNING ENTRY !!!! [H. | | |
| | M87789_s_at | M87789 | immunoglobulin gamma 3 (Gm marker) | 2.6 | 0.038916248 |
| | | | 14q32.33 | | |
| | HG3510-HT3704_at | X12795 | nuclear receptor subfamily 2, group | 2.6 | 0.016151338 |
| | | | F, member 15q14 | | |
| | RC_T64211_at | T64211 | ESTs, Weakly similar to pancortin-1 | 2.6 | 0.006233291 |
| | | | [M.musculus] | | |
| | U90552_s_at | U90552 | butyrophilin, subfamily 3, member | 2.6 | 0.004564282 |
| | | | A16p23 | | |
| | M34516_r_at | M34516 | immunoglobulin lambda-like | 2.6 | 0.049767038 |
| | | | polypeptide 322q11.2 | | |
| | RC_T23468_at | T23468 | ESTs | 2.5 | 0.00250737 |
| | RC_AA173223_at | AA173223 | ESTs, Weakly similar to | 2.5 | 0.007080285 |
| | | | !!!! ALU SUBFAMILY SQ | | |
| | | | WARNING ENTRY !!!! | | |
| | | | [H.sapi | | |
| | RC_T49061_at | T49061 | ESTs | 2.5 | 0.039642391 |
| | RC_AA234095_at | AA234095 | ESTs | 2.5 | 0.003152859 |
| | RC_F01920_s_at | F01920 | pre-B-cell leukemia transcription | 2.5 | 0.002088945 |
| | | | factor 39q33-q34 | | |
| | RC_N91461_at | N91461 | ESTs | 2.4 | 0.01015467 |
| | RC_N67575_s_at | N67575 | osteoglycin (osteoinductive factor) | 2.4 | 0.004044061 |
| | RC_AA151210_at | AA151210 | ESTs | 2.4 | 0.011476541 |
| | AA156897_s_at | AA156897 | Homo sapiens mRNA; cDNA | 2.4 | 0.033974981 |
| | | | DKFZp564l1922 | | |
| | | | (from clone DKFZp564l1922) | | |
| | W73859_at | W73859 | transcription factor 216pter-qter | 2.4 | 0.024640626 |
| | RC_H68097_at | H68097 | EST | 2.4 | 0.04870874 |
| | RC_AA436618_at | AA436618 | ESTs | 2.4 | 0.02483165 |
| | M33493_s_at | M33493 | tryptase, beta (tryptase II)16p13.3 | 2.4 | 0.02689938 |
| | AB002340_at | AB002340 | KIAA0342 gene product | 2.3 | 0.000748796 |
| | RC_AA446661_at | AA446661 | ESTs | 2.3 | 0.011980248 |
| | RC_AA084138_at | AA084138 | ESTs | 2.3 | 1.16025E−05 |
| | RC_N59866_at | N59866 | ESTs, Weakly similar to putative | 2.3 | 0.002042263 |
| | | | p150 [H.sapiens] | | |
| | RC_R42424_at | R42424 | ESTs | 2.3 | 0.003173074 |
| | RC_N39415_at | N39415 | osteoglycin (osteoinductive factor) | 2.3 | 0.001310764 |
| | J03464_s_at | J03464 | collagen, type I, alpha 27q22.1 | 2.3 | 0.006791534 |
| | RC_AA205376_at | AA205376 | KIAA0471 gene product1q24-q25 | 2.3 | 0.023123837 |
| | RC_H95960_at | H95960 | secreted protein, acidic, cysteine- | 2.3 | 0.008509182 |
| | | | rich (osteonectin)5q31.3-q32 | | |
| | D28137_at | D28137 | bone marrow stromal cell antigen | 2.3 | 0.031127266 |
| | | | 219p13.2 | | |
| | RC_N79778_at | N79778 | extracellular matrix protein 2, | 2.3 | 0.045073744 |
| | | | female organ and adipocyte | | |
| | | | specific9q22.3 | | |
| | RC_N98485_s_at | N98485 | forkhead (Drosophila)-like 66p25.3 | 2.3 | 0.033372862 |
| | M98539_at | M98539 | prostaglandin D2 synthase (21kD, | 2.2 | 0.005442674 |
| | | | brain)9q34.2-q34.3 | | |
| | RC_AA205724_at | AA205724 | ESTs | 2.2 | 0.006183612 |
| | U85625_at | U85625 | Homo sapiens ribonuclease 6 | 2.2 | 0.001245066 |
| | | | precursor, mRNA, complete cds. | | |
| | RC_R37588_s_at | R37588 | RAB2, member RAS oncogene family- | 2.2 | 0.00219386 |
| | | | like6p21.3 | | |
| | RC_AA046426_at | AA046426 | Cdc42 effector protein 3 | 2.2 | 0.005788723 |
| | RC_AA256294_at | AA256294 | ESTs | 2.2 | 0.002425605 |
| | RC_AA599120_at | AA599120 | SWI/SNF related, matrix associated, | 2.2 | 0.042979241 |
| | | | actin dependent regulator of | | |
| | | | chromatin, sub | | |
| | RC_W60186_at | W60186 | ESTs | 2.2 | 0.028494835 |
| | RC_AA599216_at | AA599216 | collapsin response mediator protein | 2.2 | 0.040523744 |
| | | | 14p16.1-p15 | | |
| | RC_AA450324_at | AA450324 | ESTs | 2.1 | 0.009094567 |
| | M31994_at | M31994 | Homo sapiens aldehyde dehydrogenase | 2.1 | 0.001561218 |
| | | | (ALDH1) gene | | |
| | RC_AA402930_at | AA402930 | ESTs | 2.1 | 0.000114627 |
| | M91029_cds2_at | M91029_cds2 | Human AMP deaminase isoform L | 2.1 | 0.02494373 |
| | | | (AMPD2) mRNA, exons 6-18, partial cds | | |
| | RC_AA450114_at | AA450114 | ESTs, Weakly similar to 17beta- | 2.1 | 4.87556E−06 |
| | | | hydroxysteroid dehydrogenase | | |
| | | | [H.sapiens] | | |
| | D62584_at | D62584 | osteoglycin (osteoinductive factor) | 2.1 | 0.000157116 |
| | RC_AA621634_at | AA621634 | ESTs | 2.1 | 0.02297009 |
| | RC_AA312946_s_at | AA312946 | ESTs | 2.1 | 3.51075E−05 |
| | X07438_s_at | X07438 | Human DMA for cellular retinol | 2.1 | 0.039015947 |
| | | | binding protein (CRBP) | | |
| | RC_N53447_at | N53447 | integral membrane protein | 2.1 | 0.009032297 |
| | | | 2CXq21.1-21.2 | | |
| | RC_AA281591_at | AA281591 | Homo sapiens mRNA; cDNA DKFZp586B211 | 2.0 | 0.016660714 |
| | | | (from clone DKFZp586B211) | | |
| | RC_R71395_at | R71395 | ESTs, Moderately similar to | 2.0 | 0.046231847 |
| | | | alternatively spliced product using | | |
| | | | exon 13A [H.sapi | | |
| | RC_T53590_s_at | T53590 | cytochrome P450, subfamily XIA | 2.0 | 0.00282074 |
| | | | (cholesterol side chain cleavage) | | |
| | | | 15q23-q24 | | |
| | RC_AA293489_at | AA293489 | KIAA0638 protein | 2.0 | 0.006966532 |
| | RC_AA447707_s_at | AA447707 | KIAA1055 protein | 2.0 | 0.001248537 |
| | RC_AA235618_f_at | AA235618 | ESTs | 2.0 | 0.012481746 |
| | RC_N68350_at | N68350 | ESTs | 2.0 | 0.035156598 |
| | RC_H81379_s_at | H81379 | ESTs, Moderately similar to KIAA0438 | 2.0 | 0.01148429 |
| | | | [H.sapiens] | | |
| | RC_D51060_s_at | D51060 | Jun activation domain binding | 2.0 | 0.016668951 |
| | | | protein1p32-p31 | | |
| | U72649_at | U72649 | B-cell translocation gene 2 | 2.0 | 0.020660388 |
| | | | (pheochromacytoma cell-3)1q32 | | |
| | RC_AA287389_at | AA287389 | ESTs | 2.0 | 0.002741873 |
| | RC_AA621367_at | AA621367 | ESTs | 2.0 | 0.004871903 |
| | J03040_at | J03040 | secreted protein, acidic, cysteine- | 2.0 | 0.006303994 |
| | | | rich (osteonectin)5q31.3-q32 | | |
| | RC_AA291676_s_at | AA291676 | non-metastatic cells 5, protein | 2.0 | 0.027480479 |
| | | | expressed in (nucleoside-diphosphate | | |
| | | | kinase)5q2 | | |
| | RC_N63536_at | N63536 | ESTs | 2.0 | 0.000634305 |
| | RC_AA411952_at | AA411952 | UDP-Gal:betaGlcNAc beta 1,3- | 2.0 | 0.011858934 |
| | | | galactosyltransferase, polypeptide | | |
| | | | 33q25 | | |
| | RC_AA252802_s_at | AA252802 | Human mRNA for TI-227H | 2.0 | 0.041027635 |
| | RC_AA382275_at | AA382275 | ESTs | 2.0 | 0.00087437 |
| | AA093923_at | AA093923 | tissue inhibitor of metalloproteinase | 2.0 | 0.046200886 |
| | | | 217q25 | | |
| | M11313_s_at | M11313 | alpha-2-macroglobulin12p13.3-p12.3 | 2.0 | 0.013660595 |
| | RC_AA398280_at | AA398280 | ESTs | 2.0 | 0.044320644 |
| | RC_N51529_at | N51529 | ESTs | 2.0 | 0.006276979 |
| | H49440_at | H49440 | nudix (nucleoside diphosphate linked | 2.0 | 0.013879331 |
| | | | moiety X)-type motif 36p21.2 | | |
| | RC_T33263_s_at | T33263 | KIAA0320 protein | 2.0 | 0.009994615 |
| | RC_T89160_r_at | T89160 | ESTs | 2.0 | 0.005289266 |
| | RC_W56792_at | W56792 | ESTs, Weakly similar to serine/ | 2.0 | 0.026130523 |
| | | | threonine protein kinase TAO1 | | |
| | | | [R.norvegicus] | | |
| | RC_R60056_at | R60056 | ESTs, Moderately similar to | 2.0 | 0.001585076 |
| | | | alternatively spliced product using | | |
| | | | exon 13A [H.sapi | | |
| Down-regulated | RC_AA398908_at | AA398908 | Human Chromosome 16 BAC clone | −21.7 | 0.007918174 |
| | | | CIT987SK-A-61E3 | | |
| | RC_AA460914_at | AA460914 | ESTs | −15.8 | 0.013659536 |
| | RC_T40895_at | T40895 | ESTs | −12.6 | 0.002430219 |
| | RC_R71792_s_at | R71792 | ESTs, Moderately similar to FAT- | −9.8 | 0.01438632 |
| | | | SPECIFIC PROTEIN FSP27 | | |
| | | | [M.musculus] | | |
| | RC_N80129_i_at | N80129 | metallothionein 1L16q13 | −8.7 | 0.002816872 |
| | X66141_at | X66141 | myosin, light polypeptide 2, | −8.0 | 0.03928942 |
| | | | regulatory, cardiac, slow12q23-q24.3 | | |
| | AA234634_f_at | AA234634 | CCAAT/enhancer binding protein | −7.4 | 0.000589696 |
| | | | (C/EBP), delta8p11.2-p11.1 | | |
| | U78294_at | U78294 | arachidonate 15-lipoxygenase, second | −6.8 | 0.017271608 |
| | | | type | | |
| | RC_AA457566_at | AA457566 | ESTs | −6.6 | 0.029644622 |
| | X93036_at | X93036 | phospholemman-like, expressed in | −6.2 | 0.011323909 |
| | | | breast tumors, 8kD | | |
| | X57129_at | X57129 | H1 histone family, member 26p21.3 | −6.1 | 0.004161922 |
| | HG1067-HT1067_r_at | M22406 | Human intestinal mucin mRNA, partial | −5.8 | 0.007202185 |
| | | | cds, clone SMUC 42 | | |
| | X65614_at | X65614 | S100 calcium-binding protein P4p16 | −5.8 | 0.006892572 |
| | RC_AA609006_at | AA609006 | ESTs | −5.7 | 0.015701354 |
| | J03910_rna1_at | J03910_rna1 | metallothionein 1G16q13 | −5.7 | 0.003506953 |
| | RC_H94471_at | H94471 | occludin5q13.1 | −5.6 | 0.025014274 |
| | AB000584_at | AB000584 | prostate differentiation factor | −5.4 | 0.003235425 |
| | RC_W88568_at | W88568 | glycogenin 2Xp22.3 | −5.1 | 0.048573115 |
| | V00594_at | V00594 | metallothionein 2A16q13 | −5.0 | 0.000721258 |
| | RC_T73433_s_at | T73433 | angiotensinogen1q41-qter | −4.9 | 0.012700144 |
| | RC_N94303_at | N94303 | ESTs | −4.5 | 4.88059E−05 |
| | RC_AA419011_at | AA419011 | Homo sapiens mRNA; cDNA DKFZp586D0823 | −4.1 | 0.013801595 |
| | | | (from clone DKFZp586D0823) | | |
| | RC_N32748_at | N32748 | ESTs | −4.1 | 0.018749207 |
| | RC_AA053424_at | AA053424 | ESTs, Weakly similar to mucin Muc3 | −4.0 | 0.001235197 |
| | | | [R.norvegicus] | | |
| | RC_AA599331_at | AA599331 | ESTs | −4.0 | 0.005480655 |
| | M99487_at | M99487 | folate hydrolase (prostate-specific | −3.9 | 0.013268152 |
| | | | membrane antigen) 111p11.2 | | |
| | RC_F02245_at | F02245 | monoamine oxidase AXp11.4-p11.3 | −3.8 | 0.002950391 |
| | X76717_at | X76717 | metallothionein 1L16q13 | −3.7 | 0.000868707 |
| | X64177_f_at | X64177 | metallothionein 1H16q13 | −3.7 | 0.002089771 |
| | RC_AA599522_r_at | AA599522 | squamous cell carcinoma antigen | −3.6 | 0.012643918 |
| | | | recognised by T cells | | |
| | L77701_at | L77701 | human homolog of yeast mitochondrial | −3.6 | 0.003341007 |
| | | | copper recruitment gene | | |
| | RC_D11824_at | D11824 | ESTs, Moderately similar to weak | −3.6 | 0.000803294 |
| | | | similarity to Arabidopsis thaliana | | |
| | | | ubiquitin-like | | |
| | RC_AA410311_at | AA410311 | ESTs | −3.5 | 0.001234064 |
| | RC_AA457235_at | AA457235 | ESTs | −3.5 | 0.012177965 |
| | RC_N93798_at | N93798 | protein tyrosine phosphatase type | −3.5 | 0.007340453 |
| | | | IVA, member 3 | | |
| | RC_AA416762_s_at | AA416762 | nuclear receptor subfamily 1, group | −3.5 | 0.010404304 |
| | | | H, member 219q13.3-19q13.3 | | |
| | RC_F03969_at | F03969 | ESTs, Weakly similar to tumorous | −3.5 | 0.011826812 |
| | | | imaginal discs protein Tid56 | | |
| | | | homolog [H.sapie | | |
| | RC_AA045487_at | AA045487 | ESTs | −3.4 | 0.025187615 |
| | RC_Z38744_at | Z38744 | putative gene product13 | −3.4 | 2.30674E−05 |
| | RC_N92502_s_at | N92502 | ESTs, Moderately similar to HERV-E | −3.4 | 0.02301359 |
| | | | integrase [H.sapiens] | | |
| | RC_R91484_at | R91484 | ESTs | −3.4 | 8.2306E−05 |
| | RC_AA165313_at | AA165313 | ESTs | −3.3 | 0.028364404 |
| | RC_AA182030_at | AA182030 | ESTs | −3.3 | 0.019770486 |
| | RC_T94447_s_at | T94447 | ESTs, Moderately similar to | −3.3 | 0.001427294 |
| | | | (defline not available 4335935) | | |
| | | | [M.musculus] | | |
| | RC_W20486_f_at | W20486 | ESTs | −3.3 | 0.002892697 |
| | RC_R16983_at | R16983 | ESTs | −3.2 | 0.000912559 |
| | RC_AA504805_s_at | AA504805 | interferon stimulated gene | −3.2 | 0.003905701 |
| | | | (20kD)15q26 | | |
| | RC_T90190_s_at | T90190 | H1 histone family, member 26p21.3 | −3.2 | 0.020618793 |
| | RC_AA135870_at | AA135870 | ESTs | −3.1 | 0.04609197 |
| | RC_H99035_at | H99035 | ESTs | −3.1 | 0.000191451 |
| | RC_R28370_at | R28370 | ESTs | −3.1 | 0.024606319 |
| | RC_T40995_f_at | T40995 | alcohol dehydrogenase 3 (class I), | −3.1 | 0.024064044 |
| | | | gamma polypeptide4q21-q23 | | |
| | MIP1-B_at | MIP1-B | karyopherin (importin) beta 2 | −3.1 | 0.005882353 |
| | RC_AA447522_at | AA447522 | ESTs, Highly similar to | −3.1 | 0.003518059 |
| | | | differentially expressed in Fanconi | | |
| | | | anemia [H.sapiens] | | |
| | RC_AA461453_at | AA461453 | ESTs, Moderately similar to Cab45a | −3.0 | 0.021949087 |
| | | | [M.musculus] | | |
| | AA429539_f_at | AA429539 | ESTs | −3.0 | 0.017623102 |
| | RC_AA476944_at | AA476944 | ESTs | −3.0 | 0.019974254 |
| | RC_N80129_f_at | N80129 | metallothionein 1L16q13 | −3.0 | 0.000219038 |
| | RC_N26904_at | N26904 | ESTs, Weakly similar to FK506/ | −2.9 | 0.006305062 |
| | | | rapamycin-binding protein FKBP13 | | |
| | | | precursor [H. | | |
| | RC_AA505136_at | AA505136 | ESTs | −2.9 | 0.005400284 |
| | AA455001_s_at | AA455001 | ESTs | −2.9 | 2.1534E−05 |
| | RC_W70131_at | W70131 | ESTs | −2.9 | 0.005764635 |
| | RC_AA043349_at | AA043349 | ESTs | −2.9 | 0.016983419 |
| | U02020_at | U02020 | pre-B-cell colony-enhancing factor | −2.9 | 0.003324497 |
| | U52969_at | U52969 | Purkinje cell protein 421q22.2-q22.3 | −2.8 | 0.00078638 |
| | RC_H22453_at | H22453 | ESTs | −2.8 | 0.000410695 |
| | RC_N22620_at | N22620 | ESTs | −2.8 | 0.005507089 |
| | RC_N64683_at | N64683 | ESTs | −2.8 | 0.00378977 |
| | RC_N24761_at | N24761 | ESTs | −2.8 | 0.004837185 |
| | RC_AA464728_s_at | AA464728 | ESTs | −2.8 | 0.004669897 |
| | RC_H83380_at | H83380 | ESTs | −2.7 | 0.016543793 |
| | M30894_at | M30894 | T-cell receptor, gamma | −2.7 | 0.034153167 |
| | | | cluster7p15-p14 | | |
| | RC_H81070_f_at | H81070 | Human metallothionein (MT)I-F gene | −2.7 | 0.022654931 |
| | J00073_at | J00073 | actin, alpha, cardiac muscle | −2.7 | 0.029724167 |
| | | | 15q11-qter | | |
| | RC_H05084_at | H05084 | ESTs, Weakly similar to ORF YDL055c | −2.7 | 0.016965435 |
| | | | [S.cerevisiae] | | |
| | AA045870_at | AA045870 | Homo sapiens mRNA; cDNA DKFZp564A072 | −2.7 | 0.005480167 |
| | | | (from clone DKF2p564A072) | | |
| | RC_T68873_f_at | T68873 | metallothionein 1L16q13 | −2.7 | 0.001140431 |
| | RC_N72253_at | N72253 | ESTs | −2.7 | 0.001832591 |
| | RC_AA447977_s_at | AA447977 | Homo sapiens mRNA; cDNA DKFZp564A072 | −2.7 | 0.001255304 |
| | | | (from clone DKF2p564A072) | | |
| | RC_H18947_at | H18947 | ESTs | −2.7 | 0.00193501 |
| | RC_H77597_f_at | H77597 | metallothionein 1H16q13 | −2.7 | 0.001560766 |
| | RC_H94475_s_at | H94475 | alpha-2-plasmin inhibitor17pter-p12 | −2.6 | 0.01435663 |
| | RC_AA025370_at | AA025370 | KIAA0872 protein | −2.6 | 0.013924142 |
| | RC_AA443114_at | AA443114 | ESTs, Moderately similar to PIM-1 | −2.6 | 0.000703574 |
| | | | PROTO-ONCOGENE SERINE/THREONINE- | | |
| | RC_F09684_at | F09684 | ESTs | −2.6 | 0.000107291 |
| | RC_AA031360_s_at | AA031360 | ESTs | −2.6 | 0.047293081 |
| | RC_AA416685_at | AA416685 | UNC13 (C. elegans)-like9p11-p12 | −2.6 | 0.023296279 |
| | D29805_at | D29805 | UDP-Gal:betaGlcNAc beta 1,4- | −2.6 | 2.3562E−05 |
| | | | galactosyltransferase, polypeptide | | |
| | | | 19p13 | | |
| | RC_H58873_s_at | H58873 | solute carrier family 2 (facilitated | −2.5 | 0.000710917 |
| | | | glucose transporter), member | | |
| | | | 11p35-p31.3 | | |
| | M10942_at | M10942 | metallothionein 1E (functional)16q13 | −2.5 | 0.017370635 |
| | RC_T03593_at | T03593 | ESTs | −2.5 | 0.006239127 |
| | RC_N95495_at | N95495 | small inducible cytokine A5 (RANTES) | −2.5 | 0.002392984 |
| | | | 17q11.2-q12 | | |
| | RC_AA017063_r_at | AA017063 | ESTs, Highly similar to Miz-1 | −2.5 | 0.048093776 |
| | | | protein [H.sapiens] | | |
| | RC_R00144_at | R00144 | ESTs | −2.5 | 0.018222161 |
| | RC_AA599522_f_at | AA599522 | squamous cell carcinoma antigen | −2.5 | 0.03100833 |
| | | | recognised by T cells | | |
| | RC_AA219552_s_at | AA219552 | ESTs | −2.5 | 0.043156485 |
| | RC_AA447537_at | AA447537 | ESTs, Moderately similar to (defline | −2.5 | 0.031129269 |
| | | | not available 5360237) | | |
| | | | [M.musculus] | | |
| | RC_AA070752_s_at | AA070752 | insulin receptor substrate 12q36 | −2.5 | 0.002895462 |
| | RC_R02003_r_at | R02003 | ESTs, Weakly similar to cappuccino | −2.4 | 0.002315115 |
| | | | [D.melanogaster] | | |
| | L13698_at | L13698 | growth arrest-specific 19q21.3-q22.1 | −2.4 | 0.013393145 |
| | RC_AA432292_at | AA432292 | ESTs, Moderately similar to B cell | −2.4 | 0.000956642 |
| | | | growth factor [H.sapiens] | | |
| | RC_H99648_s_at | H99648 | DNA segment, single copy probe | −2.4 | 0.009066307 |
| | | | LNS-CAI/LNS-CAII (deleted in | | |
| | | | polyposis5q22- | | |
| | RC_AA131919_at | AA131919 | putative type II membrane protein | −2.4 | 0.000187872 |
| | RC_AA621695_at | AA621695 | ESTs | −2.4 | 0.008761556 |
| | RC_AA598695_at | AA598695 | ESTs, Weakly similar to | −2.4 | 0.000549977 |
| | | | !!!! ALU SUBFAMILY SX | | |
| | | | WARNING ENTRY !!!! | | |
| | | | [H.sapi | | |
| | RC_AA430388_at | AA430388 | ESTs, Moderately similar to | −2.4 | 0.000135176 |
| | | | !!!! ALU SUBFAMILY SQ | | |
| | | | WARNING ENTRY !!!! [H. | | |
| | M24069_at | M24069 | cold shock domain protein A12p13.1 | −2.4 | 0.015890231 |
| | RC_AA434108_at | AA434108 | Homo sapiens heat shock protein | −2.4 | 0.013182623 |
| | | | hsp40-3 mRNA, complete cds | | |
| | RC_AA405488_at | AA405488 | ESTs | −2.3 | 0.015044159 |
| | RC_AA419546_at | AA419546 | ESTs | −2.3 | 0.030432017 |
| | RC_W38197_at | W38197 | EST | −2.3 | 0.013006462 |
| | RC_R38709_s_at | R38709 | superoxide dismutase 2, | −2.3 | 0.03567491 |
| | | | mitochondrial6q25.3 | | |
| | RC_AA121142_at | AA121142 | ESTs, Moderately similar to copper | −2.3 | 0.043639016 |
| | | | transport protein HAH1 | | |
| | | | [H.sapiens] | | |
| | RC_N26801_at | N26801 | ESTs | −2.3 | 0.000580867 |
| | RC_N75960_at | N75960 | ESTs | −2.3 | 0.01244791 |
| | RC_R36969_at | R36969 | ESTs | −2.3 | 0.019129486 |
| | AA046840_at | AA046840 | CCAAT/enhancer binding protein | −2.3 | 0.002504544 |
| | | | (C/EBP), delta8p11.2-p11.1 | | |
| | RC_R46074_at | R46074 | transforming, acidic coiled-coil | −2.3 | 0.003462273 |
| | | | containing protein 210q26 | | |
| | X06956_at | X06956 | tubulin, alpha 1 (testis specific)2q | −2.3 | 0.015437809 |
| | RC_H84761_s_at | H84761 | glutathione peroxidase 13p21.3 | −2.2 | 0.000365528 |
| | RC_W52065_f_at | W52065 | KIAA0539 gene product | −2.2 | 0.016497348 |
| | RC_AA279757_at | AA279757 | ESTs, Weakly similar to (defline | −2.2 | 0.003272622 |
| | | | not available 4481810) | | |
| | | | [D.melanogaster] | | |
| | RC_H16676_s_at | H16676 | ESTs, Weakly similar to (defline | −2.2 | 8.86866E−05 |
| | | | not available 5107634) | | |
| | | | [R.norvegicus] | | |
| | RC_AA255480_at | AA255480 | ESTs | −2.2 | 0.009359024 |
| | RC_R96924_s_at | R96924 | ESTs | −2.2 | 0.000201685 |
| | RC_AA342337_at | AA342337 | ESTs, Moderately similar to | −2.2 | 0.024999347 |
| | | | !!!! ALU SUBFAMILY SQ | | |
| | | | WARNING ENTRY !!!! [H. | | |
| | RC_AA004699_at | AA004699 | putative translation initiation | −2.2 | 0.022298405 |
| | | | factor | | |
| | RC_AA401965_at | AA401965 | tumor suppressor deleted in oral | −2.2 | 0.006294885 |
| | | | cancer-related 111q13 | | |
| | RC_F02470_at | F02470 | Homo sapiens clone 24796 mRNA | −2.2 | 0.022313149 |
| | | | sequence | | |
| | X76180_at | X76180 | sodium channel, nonvoltage-gated 1 | −2.2 | 0.023078001 |
| | | | alpha12p13 | | |
| | RC_R49138_s_at | R49138 | coatomer protein complex, subunit | −2.2 | 0.020401578 |
| | | | epsilon | | |
| | RC_D80237_s_at | D80237 | actin related protein 2/3 complex, | −2.2 | 0.022022634 |
| | | | subunit 4 (20 kD) | | |
| | RC_AA402224_at | AA402224 | growth arrest and DNA-damage- | −2.2 | 0.014983528 |
| | | | inducible, gamma9q22.1-q22.2 | | |
| | RC_AA281599_at | AA281599 | Homo sapiens mRNA for for histone | −2.2 | 0.029567009 |
| | | | H2B, clone pjG4-5-14 | | |
| | RC_N78630_at | N78630 | KIAA0870 protein | −2.2 | 0.006668895 |
| | X85785_rna1_at | X85785_rna1 | Duffy blood group 1q21-q22 | −2.2 | 0.018706507 |
| | RC_AA412063_at | AA412063 | ESTs | −2.2 | 0.000686563 |
| | RC_AA022886_at | AA022886 | ESTs, Weakly similar to | −2.2 | 0.000777067 |
| | | | phosphatidylinositol transfer protein | | |
| | | | [H.sapiens] | | |
| | RC_N24899_at | N24899 | ESTs | −2.2 | 0.030610964 |
| | RC_AA101767_at | AA101767 | ESTs | −2.2 | 0.009040467 |
| | RC_AA045503_at | AA045503 | ESTs, Weakly similar to Homo sapiens | −2.2 | 0.021950966 |
| | | | p20 protein [H.sapiens] | | |
| | RC_F10078_at | F10078 | ESTs | −2.1 | 0.040699115 |
| | RC_H02308_at | H02308 | ESTs | −2.1 | 0.036730715 |
| | RC_AA284153_at | AA284153 | ESTs | −2.1 | 0.021270233 |
| | RC_AA453433_at | AA453433 | HLA-B associated transcript-16p21.3 | −2.1 | 0.013366375 |
| | RC_AA403159_at | AA403159 | Homo sapiens Ste-20 related kinase | −2.1 | 0.025212073 |
| | | | SPAK mRNA, complete cds | | |
| | RC_T17428_s_at | T17428 | Homo sapiens clone 23836 mRNA | −2.1 | 0.044754602 |
| | | | sequence | | |
| | RC_W92449_at | W92449 | ESTs, Highly similar to (defline not | −2.1 | 0.019386585 |
| | | | available 4587714) [H.sapiens] | | |
| | RC_AA609312_at | AA609312 | ESTs | −2.1 | 0.003204911 |
| | D28589_at | D28589 | Human mRNA (KIAA00167), partial | −2.1 | 0.000408478 |
| | | | sequence | | |
| | RC_AA232508_at | AA232508 | ESTs, Highly similar to (defline not | −2.1 | 0.004626663 |
| | | | available 4929647) [H.sapiens] | | |
| | RC_AA280929_s_at | AA280929 | ESTs | −2.1 | 0.028189798 |
| | W63793_at | W63793 | S-adenosylmethionine decarboxylase | −2.1 | 0.032076011 |
| | | | 16q21-q22 | | |
| | RC_R36881_s_at | R36881 | Homo sapiens DNA from chromosome | −2.1 | 0.007343473 |
| | | | 19-cosmid R30879 containing USF2, | | |
| | | | gen | | |
| | RC_AA278767_s_at | AA278767 | ESTs | −2.1 | 0.001983494 |
| | RC_R98442_at | R98442 | ESTs | −2.1 | 0.007227226 |
| | X99728_at | X99728 | H.sapiens NDUFV3 gene, exon 3. | −2.1 | 0.001404191 |
| | RC_R09379_at | R09379 | solute carrier family 1 1 (proton- | −2.1 | 0.006004344 |
| | | | coupled divalent metal ion | | |
| | | | transporters), member | | |
| | RC_R99092_at | R99092 | EST, Moderately similar to (defline | −2.1 | 0.016256526 |
| | | | not available 5052951) | | |
| | | | [H.sapiens] | | |
| | X95325_s_at | X95325 | cold shock domain protein A12p13.1 | −2.1 | 0.025953179 |
| | RC_T56281_f_at | T56281 | Human metallothionein (MT)I-F gene | −2.1 | 0.032089569 |
| | RC_R44397_at | R44397 | ESTs | −2.1 | 0.000265391 |
| | RC_H27180_f_at | H27180 | ESTs | −2.1 | 0.004317675 |
| | AA165312_at | AA165312 | ESTs | −2.1 | 0.025559572 |
| | RC_AA279313_s_at | AA279313 | methyl CpG binding protein 2Xq28 | −2.1 | 0.030594523 |
| | HG4322-HT4592_at | AF141349 | Homo sapiens beta-tubulin mRNA, | −2.1 | 0.017120749 |
| | | | complete cds. | | |
| | RC_H81413_f_at | H81413 | high-mobility group (nonhistone | −2.1 | 0.009976588 |
| | | | chromosomal) protein isoforms I and | | |
| | | | Y6p21 | | |
| | RC_W94333_at | W94333 | ESTs, Highly similar to (defline not | −2.1 | 0.000435688 |
| | | | available 5107163) [H.sapiens] | | |
| | RC_AA455070_at | AA455070 | eukaryotic translation initiation | −2.1 | 0.025226928 |
| | | | factor 3, subunit 1 (alpha, 35kD) | | |
| | RC_R11526_f_at | R11526 | parathymosin 17q12-q22 | −2.1 | 0.027182202 |
| | RC_T15409_f_at | T15409 | EST | −2.1 | 0.001478856 |
| | RC_H05625_f_at | H05625 | ESTs | −2.1 | 0.024564209 |
| | RC_AA620461_at | AA620461 | ESTs | −2.0 | 0.022844667 |
| | RC_AA449791_f_at | AA449791 | EST | −2.0 | 0.025394324 |
| | RC_AA435769_s_at | AA435769 | ESTs | −2.0 | 0.008375153 |
| | RC_N55502_at | N55502 | ESTs | −2.0 | 0.021894439 |
| | AF001294_at | AF001294 | tumor suppressing subtransferable | −2.0 | 0.03566128 |
| | | | candidate 311p15.5 | | |
| | RC_Z40898_at | Z40898 | ESTs, Highly similar to (defline | −2.0 | 0.002289892 |
| | | | not available 4929639) | | |
| | | | [H.sapiens] | | |
| | RC_AA436861_at | AA436861 | ESTs | −2.0 | 0.00187676 |
| | M63573_at | M63573 | peptidylprolyl isomerase B | −2.0 | 0.044239663 |
| | | | (cyclophilin B)15 | | |
| | RC_T25732_f_at | T25732 | KIAA0252 protein | −2.0 | 0.041237995 |
| | RC_R01257_at | R01257 | ESTs, Weakly similar to (defline not | −2.0 | 0.005735841 |
| | | | available 4456991) [H.sapiens] | | |
| | RC_H91703_i_at | H91703 | cell division cycle 2717q12-17q23.2 | −2.0 | 0.001412925 |
| | RC_N34817_at | N34817 | ESTs | −2.0 | 0.040996591 |
| | RC_R60777_at | R60777 | ESTs, Weakly similar to KIAA0374 | −2.0 | 0.000245565 |
| | | | [H.sapiens] | | |
| | RC_AA386264_at | AA386264 | ESTs, Weakly similar to MICROTUBULE- | −2.0 | 0.000541139 |
| | | | ASSOCIATED PROTEIN 1B [M.musc | | |
| | RC_AA251769_at | AA251769 | ESTs, Weakly similar to Containing | −2.0 | 0.008985897 |
| | | | ATP/GTP-binding site motif A(P-loop): | | |
| | | | Simil | | |
| | RC_R56602_at | R56602 | Ig superfamily proteinXq12-q13.3 | −2.0 | 0.024051216 |
| | RC_AA397919_at | AA397919 | ESTs | −2.0 | 0.029784087 |
| | RC_W37778_f_at | W37778 | ESTs, Weakly similar to envelope | −2.0 | 0.043013942 |
| | | | protein [H.sapiens] | | |
| | AA248555_at | AA248555 | ESTs | −2.0 | 0.000824698 |
| | RC_AA463693_at | AA463693 | ESTs, Weakly similar to SERINE/ | −2.0 | 0.002809026 |
| | | | THREONINE-PROTEIN KINASE NEK3 | | |
| | | | [H.sap | | |
| | W76181_at | W76181 | NADH dehydrogenase (ubiquinone) 1 | −2.0 | 0.008370263 |
| | | | alpha subcomplex, 2 (8kD, B8)5q31 | | |
| | RC_AA171939_at | AA171939 | ESTs | −2.0 | 0.015796116 |
| | U30999_at | U30999 | U30999 Homo sapiens MV3 melanoma | −2.0 | 0.007070546 |
| | | | Homo sapiens cDNA clone memd | | |
| | RC_F03254_f_at | F03254 | synuclein, alpha (non A4 component | −2.0 | 0.011479379 |
| | | | of amyloid precursor)4q21 | | |
| | RC_H26288_at | H26288 | ESTs, Weakly similar to | −2.0 | 0.000262324 |
| | | | !!!! ALU SUBFAMILY SC | | |
| | | | WARNING ENTRY !!!! | | |
| | | | [H.sapi | | |
| | RC_AA007158_f_at | AA007158 | ESTs | −2.0 | 0.001870921 |
| | RC_Z38785_at | Z38785 | Homo sapiens clone 23940 mRNA | −2.0 | 0.013437083 |
| | | | sequence | | |
| | RC_AA282247_at | AA282247 | ESTs | −2.0 | 0.000515617 |
| | RC_T23935_s_at | T23935 | ESTs, Weakly similar to protein- | −2.0 | 0.006493804 |
| | | | tyrosine phosphatase [H.sapiens] | | |
| | RC_R59593_at | R59593 | ESTs | −2.0 | 0.014592934 |
| | RC_AA446241_at | AA446241 | tropomyosin 2 (beta)9p13.2-p13.1 | −2.0 | 0.040680667 |
| | RC_Z40556_at | Z40556 | DJ222E13.1a.1 (C-terminal part of | −2.0 | 0.019444878 |
| | | | novel protein dJ222E13.1) (partial | | |
| | | | isoform 1) | | |
| | RC_AA159025_at | AA159025 | ESTs, Highly similar to (defline not | −2.0 | 0.01375696 |
| | | | available 4680655) [H.sapiens] | | |
| | RC_H03387_s_at | H03387 | estrogen-responsive B box | −2.0 | 0.036382844 |
| | | | protein17p11.2 | | |
| | RC_H17333_at | H17333 | EST | −2.0 | 0.018111182 |
| | RC_AA412722_s_at | AA412722 | putative cyclin 61 interacting | −2.0 | 0.006838915 |
| | | | protein7 | | |
| | U65579_at | U65579 | NADH dehydrogenase (ubiquinone) | −2.0 | 0.013707565 |
| | | | Fe-S protein 8 (23kD) (NADH-coenzyme | | |
| | | | Q r | | |
| | RC_R88209_at | R88209 | ESTs | −2.0 | 0.040272012 |
| | RC_Z38266_at | Z38266 | Homo sapiens PAC clone DJ0777O23 | −2.0 | 0.009414008 |
| | | | from 7p14-p15 | | |

[0136] TABLE 2
Normal1-Normal2 vs BPH-Cancer TABLE

| | | | | Fold- | |
|---|---|---|---|---|---|
| | | | | Change | |
| | | | | N1-N2 | p-value |
| | | Genbank | Genbank | vs | N1-N2 vs |
| | Affy element | ID | Name | Cancer | Cancer |
| up- | L49169_at | L49169 | FBJ murine osteosarcoma viral | 18.8 | 0.03580379 |
| regu- | | | oncogene homolog B19q13.3 | | |
| lated | | | | | |
| | RC_N23730_s_at | N23730 | v-fos FBJ murine osteosarcoma | 16.5 | 8.9867E−05 |
| | | | viral oncogene homolog14q24.3 | | |
| | V01512_rna1_at | V01512_rna1 | v-fos FBJ murine osteosarcoma | 16.0 | 0.00121664 |
| | | | viral oncogene homolog | | |
| | | | 14q24.3 | | |
| | RC_T90619_f_at | T90619 | actin, gamma 117q25 | 15.7 | 0.04412419 |
| | U20734_s_at | U20734 | jun B proto-oncogene19p13.2 | 14.3 | 0.00440455 |
| | U62015_at | U62015 | insulin-like growth factor | 13.8 | 0.00048722 |
| | | | binding protein 101p22-p31 | | |
| | AA374109_at | AA374109 | ESTs, Moderately similar to | 13.0 | 0.02591146 |
| | | | (defline not available | | |
| | | | 5031506) [R.norvegicus] | | |
| | RC_T79768_at | T79768 | ESTs | 12.2 | 0.01894014 |
| | RC_AA410383_at | AA410383 | B-cell-homing chemokine | 11.1 | 0.04602578 |
| | | | (ligand for Burkitt's | | |
| | | | lymphoma receptor-1)4q21 | | |
| | X52541_at | X52541 | early growth response 15q31.1 | 9.7 | 0.00316754 |
| | RC_N66802_at | N66802 | early growth response | 9.7 | 0.02676479 |
| | | | 38p23-p21 | | |
| | RC_AA463726_s_at | AA463726 | JM27proteinXp11.23 | 9.4 | 0.00340917 |
| | N40141_at | N40141 | JM27proteinXp11.23 | 8.4 | 0.02176821 |
| | M34996_s_at | M34996 | major histocompatibility | 7.7 | 0.01588621 |
| | | | complex, class II, DQ alpha | | |
| | | | 16p21.3 | | |
| | RC_T67053_f_at | T67053 | immumoglobulin lambda gene | 7.4 | 0.00019687 |
| | | | cluster22q11.1-q11.2 | | |
| | RC_AA404957_at | AA404957 | ESTs, Highly similar to | 6.6 | 0.01145138 |
| | | | MATRIX GLA-PROTEIN PRECURSOR | | |
| | | | [H.sapiens] | | |
| | RC_H64493_f_at | H64493 | immunoglobulin gamma 3 (Gm | 6.5 | 0.00271635 |
| | | | marker)14q32.33 | | |
| | RC_N47686_s_at | N47686 | solute carrier family 14 | 6.3 | 0.01556889 |
| | | | (urea transporter), member 1 | | |
| | | | (Kidd blood group)18q11-q12 | | |
| | RC_W44760_s_at | W44760 | frizzled-related protein2qter | 6.3 | 0.01689104 |
| | L19871_at | L19871 | activating transcription | 6.2 | 0.00760329 |
| | | | factor 3 | | |
| | M92934_at | M92934 | connective tissue growth | 6.1 | 0.00104693 |
| | | | factor6q23.1 | | |
| | M62831_at | M62831 | immediate early protein19 | 5.8 | 0.00753286 |
| | L22524_s_at | L22524 | matrix metalloproteinase 7 | 5.8 | 0.0482898 |
| | | | (matrilysin, uterine)11q21-q22 | | |
| | J03507_at | J03507 | complement component 75p13 | 5.6 | 0.00240657 |
| | RC_AA236455_r_at | AA236455 | ESTs | 5.5 | 0.02265354 |
| | RC_AA450127_at | AA450127 | growth arrest and DNA-damage- | 5.5 | 0.02322759 |
| | | | inducible, beta19p13.3 | | |
| | RC_AA281345_f_at | AA281345 | immediate early protein19 | 5.4 | 0.00366107 |
| | RC_N30198_at | N30198 | ESTs | 5.3 | 0.00565776 |
| | AFFX-HSAC07/X00351_5 | X00351 | Human mRNA for beta-actin | 5.3 | 0.01547291 |
| | D83018_at | D83018 | nel (chicken)-like | 5.1 | 0.00377476 |
| | | | 212q13.11-q13.12 | | |
| | J04111_at | J04111 | Jun activation domain binding | 5.0 | 0.00024307 |
| | | | protein 1p32-p31 | | |
| | X51345_at | X51345 | jun B proto-oncogene19p13.2 | 5.0 | 0.01717342 |
| | RC_AA398903_at | AA398903 | ESTs, Weakly similar to | 4.9 | 0.01457782 |
| | | | !!!! ALU SUBFAMILY | | |
| | | | J WARNING ENTRY !!!! | | |
| | | | [H.sapiens] | | |
| | RC_H17550_at | H17550 | ESTs | 4.7 | 0.01207939 |
| | S81914_at | S81914 | immediate early response | 4.5 | 0.00621865 |
| | | | 36p21.3 | | |
| | RC_AA250958_f_at | AA250958 | EST | 4.4 | 1.8834E−05 |
| | RC_AA446651_at | AA446651 | ESTs | 4.4 | 0.0260228 |
| | HG1872-HT1907_at | M28590 | Human (clone pcDG-79) MHC | 4.3 | 0.00883052 |
| | | | HLA-DG protein 41 mRNA, | | |
| | | | partial cds. | | |
| | RC_AA490667_at | AA490667 | ESTs | 4.3 | 0.04886302 |
| | RC_N67041_at | N67041 | ESTs | 4.1 | 0.00933369 |
| | V00563_at | V00563 | immunoglobulin mu14q32.33 | 4.1 | 0.00430194 |
| | X57809_s_at | X57809 | immumoglobulin lambda gene | 4.1 | 0.02537166 |
| | | | cluster22q11.1-q11.2 | | |
| | R69417_at | R69417 | ESTs | 4.1 | 0.04637318 |
| | J00231_f_at | J00231 | immunoglobulin gamma 3 (Gm | 4.0 | 0.00476602 |
| | | | marker)14q32.33 | | |
| | RC_AA402903_f_at | AA402903 | immunoglobulin gamma 3 (Gm | 3.9 | 0.00017291 |
| | | | marker)14q32.33 | | |
| | U21128_at | U21128 | lumican12q21.3-q22 | 3.9 | 0.00070892 |
| | M12529_at | M12529 | apolipoprotein E19q13.2 | 3.7 | 0.02685625 |
| | RC_AA436616_at | AA436616 | ESTs | 3.7 | 0.02086008 |
| | U72649_at | U72649 | B-cell translocation gene 2 | 3.7 | 0.0024874 |
| | | | (pheochromacytoma cell-3)1q32 | | |
| | X03689_s_at | X03689 | Human mRNA fragment for | 3.7 | 0.04821902 |
| | | | elongation factor TU (N- | | |
| | | | terminus) | | |
| | AFFX-HSAC07/X00351_5 | X00351 | Human mRNA for beta-actin | 3.6 | 0.02971727 |
| | RC_T62857_at | T62857 | ESTs | 3.6 | 0.00284654 |
| | Z74616_s_at | Z74616 | collagen, type I, alpha | 3.6 | 0.00432829 |
| | | | 27q22.1 | | |
| | X06700_s_at | X06700 | collagen, type III, alpha 1 | 3.6 | 0.0105961 |
| | | | (Ehlers-Danlos syndrome type | | |
| | | | IV, autosomal dominant)2q31 | | |
| | RC_H86112_f_at | H86112 | KIAA0471 gene product1q24-q25 | 3.6 | 0.01701397 |
| | M57466_s_at | M57466 | major histocompatibility | 3.5 | 0.00592467 |
| | | | complex, class II, DP beta | | |
| | | | 16p21.3 | | |
| | RC_F09281_at | F09281 | ESTs | 3.5 | 0.00684173 |
| | RC_R51831_at | R51831 | ESTs | 3.4 | 0.00094142 |
| | RC_H21814_f_at | H21814 | immumoglobulin lambda gene | 3.4 | 0.0097671 |
| | | | cluster22q11.1-q11.2 | | |
| | RC_W86513_at | W86513 | ESTs | 3.4 | 0.00377648 |
| | RC_H40424_s_at | H40424 | EST | 3.4 | 0.01628391 |
| | X57025_at | X57025 | insulin-like growth factor 1 | 3.3 | 0.04048925 |
| | | | (somatomedin C)12q22-q23 | | |
| | RC_AA044219_at | AA044219 | BK984G1.1 (PUTATIVE C- | 3.3 | 0.00176111 |
| | | | terminal end of a novel | | |
| | | | protein with Collagen triple | | |
| | | | helix repea | | |
| | RC_AA028092_s_at | AA028092 | transcription factor | 3.3 | 0.00340548 |
| | | | 216pter-qter | | |
| | RC_AA446661_at | AA446661 | ESTs | 3.3 | 0.04118899 |
| | RC_D80063_f_at | D80063 | ESTs | 3.3 | 0.04958514 |
| | M92843_s_at | M92843 | zinc finger protein | 3.3 | 0.00617408 |
| | | | homologous to Zfp-36 in | | |
| | | | mouse19q13.1 | | |
| | M34516_r_at | M34516 | immunoglobulin lambda-like | 3.2 | 0.02344053 |
| | | | polypeptide 322q11.2 | | |
| | M87789_s_at | M87789 | immunoglobulin gamma 3 (Gm | 3.2 | 0.00453465 |
| | | | marker)14q32.33 | | |
| | N75870_s_at | N75870 | dual specificity phosphatase | 3.2 | 0.00015743 |
| | | | 15q34 | | |
| | RC_AA609309_at | AA609309 | ESTs, Moderately similar to | 3.1 | 0.03780658 |
| | | | !!!! ALU SUBFAMILY | | |
| | | | SB2 WARNING ENTRY | | |
| | | | !!!! [H.sapiens | | |
| | S59049_at | S59049 | regulator of G-protein | 3.0 | 0.0024193 |
| | | | signalling 11q31 | | |
| | AFFX-HUMGAPDH/M331 | M33197 | Human GAPDH | 3.0 | 0.03453829 |
| | RC_D51060_s_at | D51060 | Jun activation domain binding | 3.0 | 0.02239004 |
| | | | protein1p32-p31 | | |
| | RC_T23468_at | T23468 | ESTs | 2.9 | 0.00163462 |
| | U30521_at | U30521 | P311 protein | 2.9 | 0.0094842 |
| | Z48501_s_at | Z48501 | poly(A)-binding protein-like | 2.9 | 0.02639698 |
| | | | 13q22-q25 | | |
| | W73859_at | W73859 | transcription factor | 2.9 | 0.03732618 |
| | | | 216pter-qter | | |
| | AA093923_at | AA093923 | tissue inhibitor of | 2.8 | 0.04156402 |
| | | | metalloproteinase 217q25 | | |
| | RC_AA236476_at | AA236476 | ESTs, Weakly similar to | 2.7 | 0.03830528 |
| | | | (defline not available | | |
| | | | 4507549) [H.sapiens] | | |
| | U10550_at | U10550 | GTP-binding protein over- | 2.7 | 0.04065788 |
| | | | expressed in skeletal | | |
| | | | muscle8q13-q21 | | |
| | RC_N24902_at | N24902 | E1B-55kDa-associated protein 5 | 2.7 | 0.03810507 |
| | RC_AA056121_at | AA056121 | ESTs | 2.7 | 0.0242857 |
| | RC_H98835_at | H98835 | ESTs | 2.7 | 0.01990144 |
| | K02405_f_at | K02405 | Human MHC class II HLA-DQ- | 2.7 | 0.00138806 |
| | | | beta mRNA (DR7 DQw2), | | |
| | | | complete cds | | |
| | U90552_s_at | U90552 | butyrophilin, subfamily 3, | 2.7 | 3.9119E−05 |
| | | | member A16p23 | | |
| | RC_N59831_at | N59831 | ESTs | 2.7 | 0.04543669 |
| | L33799_at | L33799 | procollagen C-endopeptidase | 2.7 | 0.01087928 |
| | | | enhancer7q22 | | |
| | RC_N59532_s_at | N59532 | aminomethyltransferase | 2.6 | 0.02571229 |
| | | | (glycine cleavage system | | |
| | | | protein T)3p21.2-p21.1 | | |
| | D13628_at | D13628 | angiopoietin 18q22.3-q23 | 2.6 | 0.02720484 |
| | AA156897_s_at | AA156897 | Homo sapiens mRNA; cDNA | 2.6 | 0.00158002 |
| | | | DKFZp564l1922 (from clone | | |
| | | | DKFZp564l1922) | | |
| | RC_N67876_s_at | N67876 | insulin-like growth factor 1 | 2.6 | 0.03992641 |
| | | | (somatomedin C)12q22-q23 | | |
| | M73720_at | M73720 | carboxypeptidase A3 (mast | 2.6 | 0.023299 |
| | | | cell)3q21-q25 | | |
| | H49440_at | H49440 | nudix (nucleoside diphosphate | 2.6 | 0.0024987 |
| | | | linked moiety X)-type motif | | |
| | | | 36p21.2 | | |
| | RC_AA250850_at | AA250850 | adrenergic, beta, receptor | 2.5 | 0.04115609 |
| | | | kinase 222q11 | | |
| | RC_T49061_at | T49061 | ESTs | 2.5 | 0.00934004 |
| | W28214_at | W28214 | ESTs | 2.5 | 0.03767792 |
| | RC_H44631_s_at | H44631 | immediate early protein19 | 2.5 | 0.0423037 |
| | D28137_at | D28137 | bone marrow stromal cell | 2.5 | 0.02621233 |
| | | | antigen 219p13.2 | | |
| | RC_AA609027_at | AA609027 | ESTs | 2.5 | 0.03855062 |
| | RC_AA257093_r_at | AA257093 | T-cell receptor, beta | 2.4 | 0.00265323 |
| | | | cluster7q35 | | |
| | RC_F13763_at | F13763 | ESTs | 2.4 | 0.01694928 |
| | RC_H08548_s_at | H08548 | ATP citrate lyase17q12-q21 | 2.4 | 0.03699852 |
| | RC_AA436618_at | AA436618 | ESTs | 2.4 | 0.00178991 |
| | RC_W45664_S_at | W45664 | 5′ nucleotidase (CD73) | 2.4 | 0.00176273 |
| | | | 6q14-q21 | | |
| | AA082546_at | AA082546 | ESTs | 2.4 | 0.02179188 |
| | D10522_at | D10522 | myristoylated alanine-rich | 2.4 | 0.01733369 |
| | | | protein kinase C substrate | | |
| | | | (MARCKS, 80K-L)6q22.2 | | |
| | RC_AA411860_at | AA411860 | ESTs, Highly similar to | 2.4 | 0.02766922 |
| | | | (defline not available | | |
| | | | 4929723) [H.sapiens] | | |
| | AB002340_at | AB002340 | KIAA0342 gene product | 2.3 | 0.0032387 |
| | U53445_at | U53445 | downregulated in ovarian | 2.3 | 0.00936165 |
| | | | cancer 13 | | |
| | AA091278_at | AA091278 | ESTs | 2.3 | 0.04625369 |
| | RC_AA486072_i_at | AA486072 | small inducible cytokine A5 | 2.3 | 0.01281647 |
| | | | (RANTES)17q11.2-q12 | | |
| | RC_T53590_s_at | T53590 | cytochrome P450, subfamily | 2.3 | 4.2964E−05 |
| | | | XIA (cholesterol side chain | | |
| | | | cleavage)15q23-q24 | | |
| | RC_N91971_f_at | N91971 | retinol-binding protein 1, | 2.3 | 0.0251716 |
| | | | cellular3q23 | | |
| | RC_AA043777_at | AA043777 | ESTs | 2.3 | 0.00449019 |
| | RC_H54764_at | H54764 | EST, Weakly similar to X- | 2.3 | 0.03698043 |
| | | | linked retinopathy protein | | |
| | | | {C-terminal, clone XEH.8c} | | |
| | | | [H.sapien | | |
| | RC_AA443923_at | AA443923 | ESTs | 2.3 | 0.02583324 |
| | U60975_at | U60975 | Homo sapiens gp250 precursor, | 2.3 | 0.0412382 |
| | | | mRNA, complete cds. | | |
| | M34516_at | M34516 | immunoglobulin lambda-like | 2.3 | 0.04138864 |
| | | | polypeptide 322q11.2 | | |
| | RC_N36001_at | N36001 | ESTs, Weakly similar to | 2.2 | 0.00044908 |
| | | | !!!! ALU CLASS C | | |
| | | | WARNING ENTRY !!!! | | |
| | | | [H.sapiens] | | |
| | AF010193_at | AF010193 | MAD (mothers against | 2.2 | 0.00539777 |
| | | | decapentaplegic, Drosophila) | | |
| | | | homolog 718 | | |
| | AFFX-HSAC07/X00351_5 | X00351 | Human mRNA for beta-actin | 2.2 | 0.03785222 |
| | RC_AA158262_s_at | AA158262 | calpastatin5q14-q22 | 2.2 | 0.00664896 |
| | RC_AA156565_at | AA156565 | 4-nitrophenylphosphatase | 2.2 | 0.02090192 |
| | | | domain and non-neuronal | | |
| | | | SNAP25-like 122q12 | | |
| | Z11793_at | Z11793 | selenoprotein P, plasma, | 2.2 | 0.00118281 |
| | | | 15q31 | | |
| | RC_D80059_s_at | D80059 | ESTs | 2.2 | 0.03353443 |
| | RC_AA450324_at | AA450324 | ESTs | 2.2 | 0.02483201 |
| | RC_N39415_at | N39415 | osteoglycin (osteoinductive | 2.2 | 0.03200112 |
| | | | factor) | | |
| | RC_T23622_at | T23622 | ESTs | 2.2 | 0.04041783 |
| | RC_AA599365_at | AA599365 | decorin12q23 | 2.2 | 0.01132518 |
| | X62320_at | X62320 | granulin17 | 2.2 | 0.04304386 |
| | RC_R85291_at | R85291 | ESTs | 2.2 | 0.00498769 |
| | M11313_s_at | M11313 | alpha-2-macroglobulin12p13.3- | 2.2 | 0.01154574 |
| | | | p12.3 | | |
| | AA047151_at | AA047151 | ESTs | 2.2 | 0.03398758 |
| | RC_AA205724_at | AA205724 | ESTs | 2.2 | 0.00456937 |
| | RC_AA086264_i_at | AA086264 | ESTs, Highly similar to | 2.2 | 0.02063742 |
| | | | (defline not available | | |
| | | | 4191348) [H.sapiens] | | |
| | RC_R42424_at | R42424 | ESTs | 2.2 | 0.03360342 |
| | RC_AA347359_s_at | AA347359 | lysozyme (renal amyloidosis) | 2.1 | 0.0287645 |
| | | | 12 | | |
| | AA092716_at | AA092716 | HLA-B associated transcript- | 2.1 | 0.03171735 |
| | | | 36p21.3 | | |
| | RC_R42241_at | R42241 | ESTs | 2.1 | 0.00801397 |
| | RC_N57577_at | N57577 | KIAA0663 gene product | 2.1 | 0.03202888 |
| | RC_W67577_s_at | W67577 | CD74 antigen (invariant | 2.1 | 0.00207212 |
| | | | polypeptide of major histo- | | |
| | | | compatibility complex, class | | |
| | | | II antigen- | | |
| | C02016_at | C02016 | KIAA0447 gene product | 2.1 | 0.00239989 |
| | RC_AA256268_at | AA256268 | ESTs | 2.1 | 0.0269568 |
| | RC_T96171_at | T96171 | EST | 2.1 | 0.01221923 |
| | X72841_at | X72841 | retinoblastoma-binding | 2.1 | 0.03377469 |
| | | | protein 7 | | |
| | RC_R45698_at | R45698 | ESTs | 2.1 | 0.04997589 |
| | RC_N22006_s_at | N22006 | EST | 2.1 | 0.01113134 |
| | RC_N69222_at | N69222 | ESTs | 2.1 | 0.02225692 |
| | RC_H97538_at | H97538 | ESTs | 2.0 | 0.03795259 |
| | RC_AA039935_at | AA039935 | dynein light chain, outer | 2.0 | 0.01148877 |
| | | | arm 422q12.3-q13.2 | | |
| | RC_AA084138_at | AA084138 | ESTs | 2.0 | 0.01112443 |
| | AB002379_at | AB002379 | KIAA0381 protein | 2.0 | 0.00053041 |
| | RC_AA460651_at | AA460651 | heterogeneous nuclear protein | 2.0 | 0.02769789 |
| | | | similar to rat helix | | |
| | | | destabilizing protein 10 | | |
| | RC_W02204_at | W02204 | solute carrier family 24 | 2.0 | 0.00115779 |
| | | | (sodium/potassium/calcium | | |
| | | | exchanger), member 115q22 | | |
| | Y08614_at | Y08614 | exportin 1 (CRM1, yeast, | 2.0 | 0.03536837 |
| | | | homolog)2p16 | | |
| | D31134_at | D31134 | KIAA1075 protein | 2.0 | 0.02119653 |
| | M94880_f_at | M94880 | major histocompatibility | 2.0 | 0.02538217 |
| | | | complex, class I, A6p21.3 | | |
| | J03040_at | J03040 | secreted protein, acidic, | 2.0 | 0.03547255 |
| | | | cysteine-rich (osteonectin) | | |
| | | | 5q31.3-q32 | | |
| | RC_N68350_at | N68350 | ESTs | 2.0 | 0.04291789 |
| | RC_H48793_at | H48793 | EST | 2.0 | 0.00296551 |
| | HG3543-HT3739_at | M29645 | insulin-like growth factor 2 | 2.0 | 0.01971237 |
| | | | (somatomedin A)11p15.5 | | |
| | RC_W33172_at | W33172 | ESTs, Weakly similar to ORF2 | 2.0 | 0.00645411 |
| | | | [M.musculus] | | |
| | RC_R08850_at | R08850 | ESTs | 2.0 | 0.01136477 |
| | W52638_at | W52638 | ESTs | 2.0 | 0.0106124 |
| | M19045_f_at | M19045 | lysozyme (renal amyloidosis) | 2.0 | 0.00456197 |
| | | | 12 | | |
| | RC_AA312946_s_at | AA312946 | ESTs | 2.0 | 0.0202722 |
| | RC_AA235310_at | AA235310 | ESTs | 2.0 | 0.01195494 |
| | X03100_cds2_at | X03100_cds2 | Human mRNA for SB classII | 2.0 | 0.00240454 |
| | | | histocompatibility antigen | | |
| | | | alpha-chain | | |
| | RC_T16282_f_at | T16282 | wee1+ (S. pombe) | 2.0 | 0.03147215 |
| | | | homolog11p15.3-p15.1 | | |
| | RC_H66642_f_at | H66642 | ESTs, Moderately similar to | 2.0 | 0.02460529 |
| | | | !!!! ALU SUBFAMILY | | |
| | | | SQ WARNING ENTRY !!!! | | |
| | | | [H.sapiens] | | |
| down- | RC_AA342337_at | AA342337 | ESTs, Moderately similar to | −23.7 | 3.2634E−05 |
| regu- | | | !!!! ALU SUBFAMILY | | |
| lated | | | SQ WARNING ENTRY !!!! | | |
| | | | [H.sapiens] | | |
| | RC_AA398908_at | AA398908 | Human Chromosome 16 BAC clone | −21.7 | 0.04005363 |
| | | | CIT987SK-A-61E3 | | |
| | RC_H15143_s_at | H15143 | Human clone 23575 mRNA, | −13.8 | 0.02826163 |
| | | | partial cds | | |
| | RC_N80129_i_at | N80129 | metallothionein 1L16q13 | −12.6 | 0.00214604 |
| | RC_AA465394_at | AA465394 | ESTs | −12.6 | 0.00496116 |
| | RC_AA236545_at | AA236545 | ESTs | −12.5 | 0.03493817 |
| | RC_W42778_at | W42778 | Homo sapiens clone 24636 | −12.3 | 0.01044942 |
| | | | mRNA sequence | | |
| | RC_T40895_at | T40895 | ESTs | −12.0 | 0.01968535 |
| | RC_H94475_s_at | H94475 | alpha-2-plasmin | −11.7 | 0.01291982 |
| | | | inhibitor17pter-p12 | | |
| | RC_R71792_s_at | R71792 | ESTs, Moderately similar to | −10.4 | 0.00254036 |
| | | | FAT-SPECIFIC PROTEIN FSP27 | | |
| | | | [M.musculus] | | |
| | RC_AA609006_at | AA609006 | ESTs | −7.5 | 0.01390298 |
| | RC_AA026641_s_at | AA026641 | secretory leukocyte protease | −7.0 | 0.01850877 |
| | | | inhibitor (antileuko- | | |
| | | | proteinase) | | |
| | X65614_at | X65614 | S100 calcium-binding protein | −6.7 | 0.00563431 |
| | | | P4p16 | | |
| | X93036_at | X93036 | phospholemman-like, expressed | −6.6 | 0.00527827 |
| | | | in breast tumors, 8kD | | |
| | RC_T94447_s_at | T94447 | ESTs, Moderately similar to | −5.7 | 0.00689191 |
| | | | (defline not available | | |
| | | | 4335935) [M.musculus] | | |
| | RC_AA405488_at | AA405488 | ESTs | −5.5 | 0.00023986 |
| | RC_T73433_s_at | T73433 | angiotensinogen 1q41-qter | −5.5 | 0.0094182 |
| | M99487_at | M99487 | folate hydrolase (prostate- | −5.3 | 0.00806779 |
| | | | specific membrane antigen) | | |
| | | | 111p11.2 | | |
| | RC_W88568_at | W88568 | glycogenin 2Xp22.3 | −5.1 | 0.02473908 |
| | RC_AA460914_at | AA460914 | ESTs | −5.0 | 0.02438555 |
| | X57129_at | X57129 | H1 histone family, member | −4.8 | 0.0063225 |
| | | | 26p21.3 | | |
| | RC_Z41642_at | Z41642 | ESTs | −4.7 | 0.00952552 |
| | RC_R46074_at | R46074 | transforming, acidic coiled- | −4.7 | 0.00132784 |
| | | | coil containing protein 210q26 | | |
| | J03910_rna1_at | J03910_rna1 | metallothionein 1G16q13 | −4.6 | 0.00457428 |
| | RC_AA350265_at | AA350265 | histone deacetylase A | −4.5 | 0.00289741 |
| | AA165312_at | AA165312 | ESTs | −4.2 | 0.0054878 |
| | RC_AA419011_at | AA419011 | Homo sapiens mRNA; cDNA | −4.0 | 0.01907956 |
| | | | DKFZp586D0823 (from clone | | |
| | | | DKFZp586D0823) | | |
| | RC_N92502_s_at | N92502 | ESTs, Moderately similar to | −4.0 | 0.03014404 |
| | | | HERV-E integrase | | |
| | | | [H.sapiens] | | |
| | RC_F03969_at | F03969 | ESTs, Weakly similar to | −4.0 | 0.01702461 |
| | | | tumorous imaginal discs | | |
| | | | protein Tid56 homolog | | |
| | | | [H.sapiens] | | |
| | X76717_at | X76717 | metallothionein 1L16q13 | −3.9 | 0.0011454 |
| | RC_AA416762_s_at | AA416762 | nuclear receptor subfamily 1, | −3.8 | 0.0117353 |
| | | | group H, member 219q13.3- | | |
| | | | 19q13.3 | | |
| | RC_AA053424_at | AA053424 | ESTs, Weakly similar to mucin | −3.8 | 0.00973743 |
| | | | Muc3 [R.norvegicus] | | |
| | X64177_f_at | X64177 | metallothionein 1H16q13 | −3.7 | 0.00329719 |
| | RC_N32748_at | N32748 | ESTs | −3.6 | 0.02145417 |
| | RC_AA416685_at | AA416685 | UNC13 (C. elegans)-like9p11- | −3.6 | 0.01633839 |
| | | | p12 | | |
| | RC_AA505136_at | AA505136 | ESTs | −3.5 | 0.0072004 |
| | RC_AA165313_at | AA165313 | ESTs | −3.5 | 0.03764919 |
| | RC_F02245_at | F02245 | monoamine oxidase AXp11.4- | −3.4 | 0.00548613 |
| | | | p11.3 | | |
| | RC_AA004699_at | AA004699 | putative translation | −3.4 | 0.00057505 |
| | | | initiation factor | | |
| | RC_AA599331_at | AA599331 | ESTs | −3.4 | 0.01136457 |
| | RC_N26904_at | N26904 | ESTs, Weakly similar to | −3.3 | 0.04541061 |
| | | | FK506/rapamycin-binding | | |
| | | | protein FKBP13 precursor | | |
| | | | [H.sapiens] | | |
| | RC_AA070752_s_at | AA070752 | insulin receptor substrate | −3.3 | 0.02843376 |
| | | | 12q36 | | |
| | RC_AA599522_f_at | AA599522 | squamous cell carcinoma | −3.2 | 0.0053113 |
| | | | antigen recognised by T cells | | |
| | RC_N94303_at | N94303 | ESTs | −3.1 | 0.00016072 |
| | RC_F10078_at | F10078 | ESTs | −3.1 | 0.02246459 |
| | RC_AA447537_at | AA447537 | ESTs, Moderately similar to | −3.1 | 0.00732373 |
| | | | (defline not available | | |
| | | | 5360237) [M.musculus] | | |
| | L77701_at | L77701 | human homolog of yeast | −3.0 | 0.00148993 |
| | | | mitochondrial copper | | |
| | | | recruitment gene | | |
| | RC_H27675_at | H27675 | ESTs | −3.0 | 0.0161605 |
| | V00594_at | V00594 | metallothionein 2A16q13 | −2.9 | 0.00149526 |
| | U52969_at | U52969 | Purkinje cell protein | −2.9 | 6.3447E−05 |
| | | | 421q22.2-q22.3 | | |
| | RC_R42607_at | R42607 | ESTs | −2.8 | 0.00896005 |
| | RC_AA451836_at | AA451836 | ESTs | −2.7 | 0.00840159 |
| | RC_F04492_at | F04492 | ESTs, Weakly similar to | −2.7 | 0.00144305 |
| | | | !!!! ALU SUBFAMILY | | |
| | | | J WARNING ENTRY !!!! | | |
| | | | [H.sapiens] | | |
| | RC_H77597_f_at | H77597 | metallothionein 1H16q13 | −2.7 | 0.00332868 |
| | RC_AA430388_at | AA430388 | ESTs, Moderately similar to | −2.7 | 0.000114 |
| | | | !!!! ALU SUBFAMILY | | |
| | | | SQ WARNING ENTRY !!!! | | |
| | | | [H.sapiens] | | |
| | RC_T90190_s_at | T90190 | H1 histone family, member | −2.7 | 0.03024271 |
| | | | 26p21.3 | | |
| | RC_H16171_f_at | H16171 | cleft lip and palate | −2.7 | 0.02341444 |
| | | | associated transmembrane | | |
| | | | protein 119q13.2-q13.3 | | |
| | RC_AA022886_at | AA022886 | ESTs, Weakly similar to | −2.7 | 0.00489294 |
| | | | phosphatidylinositol transfer | | |
| | | | protein [H.sapiens] | | |
| | RC_R28370_at | R28370 | ESTs | −2.7 | 0.00372455 |
| | RC_AA261907_at | AA261907 | ESTs, Weakly similar to | −2.6 | 0.04368944 |
| | | | (defline not available | | |
| | | | 3874144) [C.elegans] | | |
| | RC_W37778_f_at | W37778 | ESTs, Weakly similar to | −2.6 | 0.03075684 |
| | | | envelope protein | | |
| | | | [H.sapiens] | | |
| | RC_T98019_at | T98019 | EST, Highly similar to | −2.5 | 0.03556668 |
| | | | PEREGRIN [H.sapiens] | | |
| | RC_N33927_s_at | N33927 | H2B histone family, member | −2.5 | 0.01309393 |
| | | | B6p21.3 | | |
| | RC_R40431_at | R40431 | Homo sapiens mRNA; cDNA | −2.5 | 0.00423554 |
| | | | DKFZp564D016 (from clone | | |
| | | | DKFZp564D016) | | |
| | RC_AA133756_at | AA133756 | Rho-associated, coiled-coil | −2.5 | 0.01238916 |
| | | | containing protein kinase | | |
| | | | 22p24 | | |
| | RC_AA152200_S_at | AA152200 | ESTs | −2.5 | 0.00436614 |
| | W63793_at | W63793 | S-adenosylmethionine decar- | −2.5 | 0.00571425 |
| | | | boxylase 16q21-q22 | | |
| | RC_AA410298_at | AA410298 | ESTs | −2.5 | 0.01874462 |
| | X99728_at | X99728 | H.sapiens NDUFV3 gene, exon | −2.5 | 0.00458038 |
| | | | 3 | | |
| | RC_W78127_at | W78127 | ESTs, Weakly similar to | −2.5 | 0.00124016 |
| | | | KIAA0425 [H.sapiens] | | |
| | RC_R96924_s_at | R96924 | ESTs | −2.5 | 0.00651591 |
| | RC_H16768_at | H16768 | ESTs | −2.5 | 0.00566924 |
| | X76180_at | X76180 | sodium channel, nonvoltage- | −2.5 | 0.00762502 |
| | | | gated 1 alpha12p13 | | |
| | RC_AA432162_at | AA432162 | Homo sapiens mRNA; cDNA | −2.4 | 0.01019911 |
| | | | DKFZp586B2022 (from clone | | |
| | | | DKFZp586B2022) | | |
| | RC_H88798_at | H88798 | ESTs | −2.4 | 0.00078314 |
| | RC_AA609312_at | AA609312 | ESTs | −2.4 | 0.01624332 |
| | RC_AA131919_at | AA131919 | putative type II membrane | −2.4 | 0.00026479 |
| | | | protein | | |
| | RC_N80129_f_at | N80129 | metallothionein 1L16q13 | −2.4 | 0.00229702 |
| | RC_AA182030_at | AA182030 | ESTs | −2.4 | 0.04163238 |
| | W70167_at | W70167 | ESTs | −2.4 | 0.00395969 |
| | RC_AA599522_r_at | AA599522 | squamous cell carcinoma | −2.4 | 0.00434708 |
| | | | antigen recognised by T cells | | |
| | RC_N52254_s_at | N52254 | SH3-binding domain glutamic | −2.4 | 0.01117139 |
| | | | acid-rich protein21q22.3 | | |
| | RC_N95495_at | N95495 | small inducible cytokine A5 | −2.4 | 0.00243024 |
| | | | (RANTES)17q11.2-q12 | | |
| | RC_T68873_f_at | T68873 | metallothionein 1L16q13 | −2.4 | 0.00320019 |
| | AA429539_f_at | AA429539 | ESTs | −2.4 | 0.02075188 |
| | RC_AA435769_s_at | AA435769 | ESTs | −2.4 | 0.00983235 |
| | RC_AA029356_at | AA029356 | ESTs | −2.3 | 0.00720872 |
| | AA316686_s_at | AA316686 | ESTs, Highly similar to | −2.3 | 0.00022575 |
| | | | huntingtin interacting | | |
| | | | protein HYPK [H.sapiens] | | |
| | RC_H02308_at | H02308 | ESTs | −2.3 | 0.04177629 |
| | RC_AA258476_at | AA258476 | Homo sapiens mRNA; cDNA | −2.3 | 0.02070961 |
| | | | DKFZp564J0323 (from clone | | |
| | | | DKFZp564J0323) | | |
| | X06956_at | X06956 | tubulin, alpha 1 (testis | −2.3 | 0.00365687 |
| | | | specific)2q | | |
| | RC_H99694_at | H99694 | ESTs | −2.3 | 0.01364534 |
| | RC_AA479044_s_at | AA479044 | ESTs, Weakly similar to | −2.3 | 0.0470323 |
| | | | PROGASTRICSIN PRECURSOR | | |
| | | | [H.sapiens] | | |
| | RC_AA436861_at | AA436861 | ESTs | −2.3 | 0.0017942 |
| | M24069_at | M24069 | cold shock domain protein | −2.3 | 0.01412351 |
| | | | A12p13.1 | | |
| | RC_AA410311_at | AA410311 | ESTs | −2.3 | 0.04522701 |
| | W52858_at | W52858 | Homo sapiens mRNA; cDNA | −2.3 | 0.0022764 |
| | | | DKFZp564F0522 (from clone | | |
| | | | DKFZp564F0522) | | |
| | RC_W38197_at | W38197 | EST | −2.3 | 1.9602E−05 |
| | J00073_at | J00073 | actin, alpha, cardiac | −2.3 | 0.01847689 |
| | | | muscle15q11-qter | | |
| | RC_D51069_f_at | D51069 | melanoma adhesion molecule | −2.3 | 0.04269339 |
| | RC_AA504805_s_at | AA504805 | interferon stimulated gene | −2.3 | 0.00880589 |
| | | | (20kD)15q26 | | |
| | RC_F03254_f_at | F03254 | synuclein, alpha (non A4 | −2.3 | 0.00366891 |
| | | | component of amyloid | | |
| | | | precursor)4q21 | | |
| | M35252_at | M35252 | transmembrane 4 superfamily | −2.3 | 0.02808319 |
| | | | member 3 | | |
| | RC_AA040731_at | AA040731 | ESTs | −2.2 | 0.02892481 |
| | RC_AA496247_at | AA496247 | ESTs | −2.2 | 0.01333631 |
| | X59766_at | X59766 | alpha-2-glycoprotein 1, | −2.2 | 0.00200351 |
| | | | zinc7 | | |
| | RC_R84421_at | R84421 | eukaryotic translation | −2.2 | 0.01633371 |
| | | | elongation factor 1 alpha | | |
| | | | 16q14 | | |
| | AA328993_s_at | AA328993 | ESTs | −2.2 | 0.0044386 |
| | RC_R44535_f_at | R44535 | endonuclease G9q34.1 | −2.2 | 0.01431962 |
| | U41518_at | U41518 | aquaporin 1 (channel-forming | −2.2 | 0.00944746 |
| | | | integral protein, 28kD)7p14 | | |
| | RC_W33179_at | W33179 | testis-specific kinase 21p32 | −2.2 | 0.00110427 |
| | RC_H58873_s_at | H58873 | solute carrier family 2 | −2.2 | 0.00023864 |
| | | | (facilitated glucose trans- | | |
| | | | porter), member 11p35-p31.3 | | |
| | RC_R31679_s_at | R31679 | ESTs | −2.2 | 0.01000414 |
| | RC_AA189083_at | AA189083 | ESTs, Highly similar to | −2.2 | 0.00246805 |
| | | | (defline not available | | |
| | | | 4589468) [M.musculus] | | |
| | RC_AA251769_at | AA251769 | ESTs, Weakly similar to | −2.2 | 0.01081902 |
| | | | Containing ATP/GTP-binding | | |
| | | | site motif A(P-loop): Similar | | |
| | | | to C.el | | |
| | RC_W70131_at | W70131 | ESTs | −2.2 | 0.02955725 |
| | RC_R09379_at | R09379 | solute carrier family 11 | −2.2 | 0.00973051 |
| | | | (proton-coupled divalent | | |
| | | | metal ion transporters), | | |
| | | | member 212q13 | | |
| | RC_AA621695_at | AA621695 | ESTs | −2.1 | 0.00199405 |
| | RC_H18947_at | H18947 | ESTs | −2.1 | 0.02724627 |
| | RC_AA219552_s_at | AA219552 | ESTs | −2.1 | 0.04651094 |
| | RC_N22620_at | N22620 | ESTs | −2.1 | 0.01352739 |
| | RC_R02003_r_at | R02003 | ESTs, Weakly similar to | −2.1 | 0.0105971 |
| | | | cappuccino [D. | | |
| | | | melanogaster] | | |
| | RC_AA405559_at | AA405559 | ESTs | −2.1 | 0.0093056 |
| | RC_AA463693_at | AA463693 | ESTs, Weakly similar to | −2.1 | 0.004157 |
| | | | SERINE/THREONINE-PROTEIN | | |
| | | | KINASE NEKS [H.sapiens] | | |
| | RC_AA481407_at | AA481407 | ESTs | −2.1 | 0.0027417 |
| | M11119_at | M11119 | Human endogenous retrovirus | −2.1 | 0.00371888 |
| | | | envelope region mRNA (PL1) | | |
| | RC_AA159025_at | AA159025 | ESTs, Highly similar to | −2.1 | 0.01112753 |
| | | | (defline not available | | |
| | | | 4680655) [H.sapiens] | | |
| | RC_AA411981_at | AA411981 | ESTs, Weakly similar to | −2.1 | 0.04429461 |
| | | | putative seven pass trans- | | |
| | | | membrane protein [H.sapiens] | | |
| | RC_W57931_at | W57931 | ESTs, Moderately similar to | −2.1 | 0.00075574 |
| | | | CATHEPSIN D PRECURSOR | | |
| | | | [H.sapiens] | | |
| | X66899_at | X66899 | Ewing sarcoma breakpoint | −2.1 | 0.0020689 |
| | | | region 122q12 | | |
| | RC_R49327_at | R49327 | solute carrier family 11 | −2.1 | 0.03092884 |
| | | | (proton-coupled divalent | | |
| | | | metal ion transporters), | | |
| | | | member 212q13 | | |
| | RC_AA609645_at | AA609645 | eukaryotic translation | −2.1 | 0.04955957 |
| | | | initiation factor 4 gamma, | | |
| | | | 13q27-qter | | |
| | RC_AA434108_at | AA434108 | Homo sapiens heat shock | −2.1 | 0.03446875 |
| | | | protein hsp40-3 mRNA, | | |
| | | | complete cds | | |
| | X17567_s_at | X17567 | small nuclear ribonucleo- | −2.1 | 0.01447522 |
| | | | protein polypeptides B and | | |
| | | | B120 | | |
| | J04164_at | J04164 | interferon-induced protein | −2.1 | 0.02341035 |
| | | | 17 | | |
| | RC_AA135929_s_at | AA135929 | ESTs, Highly similar to | −2.1 | 0.00300907 |
| | | | (defline not available | | |
| | | | 4103057) [M.musculus] | | |
| | L04270_at | L04270 | lymphotoxin beta receptor | −2.1 | 0.00677699 |
| | | | (TNFR superfamily, member | | |
| | | | 312p13 | | |
| | RC_H99035_at | H99035 | ESTs | −2.1 | 0.00105388 |
| | M64673_at | M64673 | heat shock transcription | −2.1 | 0.004283 |
| | | | factor 1 | | |
| | X85785_rna1_at | X85785_rna1 | Duffy blood group1q21-q22 | −2.1 | 0.00657464 |
| | M68864_at | M68864 | Human ORF mRNA, complete cds | −2.1 | 0.01018583 |
| | D50928_at | D50928 | KIAA0138 gene product | −2.1 | 0.00228306 |
| | RC_AA282247_at | AA282247 | ESTs | −2.0 | 0.00797004 |
| | RC_R00144_at | R00144 | ESTs | −2.0 | 0.00693985 |
| | RC_AA485965_at | AA485965 | ESTs, Highly similar to | −2.0 | 0.00040504 |
| | | | (defline not available | | |
| | | | 4336766) [H.sapiens] | | |
| | S45630_at | S45630 | crystallin, alpha B11q22.3- | −2.0 | 0.00615727 |
| | | | q23.1 | | |
| | RC_T89703_at | T89703 | ESTs, Highly similar to | −2.0 | 0.00028662 |
| | | | (defline not available | | |
| | | | 4455129) [H.sapiens] | | |
| | RC_Z38785_at | Z38785 | Homo sapiens clone 23940 | −2.0 | 0.00706437 |
| | | | mRNA sequence | | |
| | X85373_at | X85373 | small nuclear ribonucleo- | −2.0 | 6.9388E−05 |
| | | | protein polypeptide G | | |
| | RC_F04816_at | F04816 | ESTs | −2.0 | 0.00535318 |
| | RC_AA043349_at | AA043349 | ESTs | −2.0 | 0.01749596 |
| | RC_H84761_s_at | H84761 | glutathione peroxidase | −2.0 | 0.00011662 |
| | | | 13p21.3 | | |
| | M34338_s_at | M34338 | spermidine synthase1p36-p22 | −2.0 | 0.00856614 |
| | L13698_at | L13698 | growth arrest-specific | −2.0 | 0.01650451 |
| | | | 19q21.3-q22.1 | | |
| | RC_N75960_at | N75960 | ESTs | −2.0 | 0.02408243 |
| | D45370_at | D45370 | adipose specific 210 | −2.0 | 0.03436216 |
| | RC_AA401965_at | AA401965 | tumor suppressor deleted in | −2.0 | 0.01119009 |
| | | | oral cancer-related 111q13 | | |
| | RC_F09315_at | F09315 | discs, large (Drosophila) | −2.0 | 0.02075304 |
| | | | homolog 510q23 | | |
| | RC_AA025370_at | AA025370 | KIAA0872 protein | −2.0 | 0.02656556 |
| | RC_H52835_at | H52835 | phytanoyl-CoA hydroxylase | −2.0 | 0.01502125 |
| | | | (Refsum disease)10pter-p11.2 | | |
| | RC_H99648_s_at | H99648 | DNA segment, single copy | −2.0 | 0.01211585 |
| | | | probe LNS-CAI/LNS-CAII | | |
| | | | (deleted in polyposis5q22-q23 | | |
| | RC_AA430074_at | AA430074 | ESTs | −2.0 | 0.00235505 |
| | RC_AA598939_at | AA598939 | ESTs | −2.0 | 0.01138387 |
| | AA455001_s_at | AA455001 | ESTs | −2.0 | 0.0001762 |
| | RC_F09684_at | F09684 | ESTs | −2.0 | 0.00274168 |
| | D42073_at | D42073 | reticulocaibin 1, EF-hand | −2.0 | 0.01288169 |
| | | | calcium binding domain11p13 | | |
| | RC_AA598695_at | AA598695 | ESTs, Weakly similar to | −2.0 | 4.7727E−06 |
| | | | !!!! ALU SUBFAMILY | | |
| | | | SX WARNING ENTRY !!!! | | |
| | | | [H.sapiens] | | |
| | D23662_at | D23662 | neural precursor cell | −2.0 | 0.00315614 |
| | | | expressed, developmentally | | |
| | | | down-regulated 8 | | |
| | RC_AA431470_at | AA431470 | protein kinase (cAMP- | −2.0 | 0.03869298 |
| | | | dependent, catalytic) | | |
| | | | inhibitor gamma20q | | |
| | RC_AA399273_at | AA399273 | ESTs | −2.0 | 0.02940312 |
| | RC_AA142858_at | AA142858 | ESTs | −2.0 | 0.00197166 |
| | RC_Z40715_at | Z40715 | Homo sapiens mRNA; cDNA | −2.0 | 0.01720634 |
| | | | DKFZp586C201 (from clone | | |
| | | | DKFZp586C201) | | |
| | RC_AA490341_s_at | AA490341 | ESTs | −2.0 | 0.00457094 |
| | RC_N67815_f_at | N67815 | ESTs, Weakly similar to | −2.0 | 0.00299669 |
| | | | (defline not available | | |
| | | | 4680655) [H.sapiens] | | |
| | RC_N53359_at | N53359 | ESTs | −2.0 | 0.03491616 |

[0137] TABLE 3
Normal vs. BPH W/Symptoms TABLE

| up- | | | | | |
|---|---|---|---|---|---|
| regu- | | | | Fold- | |
| lated | Affy element | GenBank ID | GenBank Name | change | t |
| 1 | N40141_at | N40141 | JM27 protein | 17.4 | −7.64 |
| 2 | rc_N23730_s_at | N23730 | v-fos FBJ murine osteosarcoma viral | 10.8 | −7.54 |
| | | | oncogene homolog | | |
| 3 | rc_AA463726_s_at | AA463726 | JM27 protein | 10.0 | −6.56 |
| 4 | rc_N23352_s_at | N23352 | proenkephalin | 10.0 | −4.53 |
| 5 | rc_H64493_f_at | H64493 | immunoglobulin heavy constant gamma | 9.1 | −4.36 |
| | | | 3 (G3m marker) | | |
| 6 | V01512_rna1_at | V01512 | v-fos FBJ murine osteosarcoma viral | 9.1 | −7.40 |
| | | | oncogene homolog | | |
| 7 | rc_H05704_r_at | H05704 | HCR (a-helix coiled-coil rod | 8.1 | −2.79 |
| | | | homologue) | | |
| 8 | L49169_at | L49169 | FBJ murine osteosarcoma viral | 8.0 | −5.81 |
| | | | oncogene homolog B | | |
| 9 | rc_AA410383_at | AA410383 | B-cell-Homing chemokine (ligand for | 7.5 | −3.95 |
| | | | Burkitt's lymphoma receptor-1) | | |
| 10 | rc_AA131322_s_at | AA131322 | tryptase, alpha, tryptase, beta | 7.2 | −2.81 |
| | | | (tryptase II) | | |
| 11 | R56183_s_at | R56183 | eukaryotic translation initiation | 6.9 | −2.77 |
| | | | factor 3, subunit 8 (48kD) | | |
| 12 | rc_AA461300_at | AA461300 | ESTs | 6.9 | −7.08 |
| 13 | J00231_f_at | J00231 | immunoglobulin heavy constant gamma | 6.7 | −4.62 |
| | | | 3 (G3m marker) | | |
| 14 | rc_AA427622_s_at | AA427622 | collagen, type XIII, alpha 1 | 6.6 | −8.25 |
| 15 | rc_T90889_at | T90889 | ESTs | 5.6 | −3.72 |
| 16 | rc_AA402903_f_at | AA402903 | immunoglobulin heavy constant gamma | 5.6 | −3.61 |
| | | | 3 (G3m marker) | | |
| 17 | rc_T23622_at | T23622 | ESTs | 5.5 | −5.24 |
| 18 | rc_T62857_at | T62857 | ESTs | 5.4 | −7.85 |
| 19 | rc_AA256268_at | AA256268 | ESTs | 5.3 | −6.86 |
| 20 | rc_R44714_s_at | R44714 | ESTs | 5.3 | −4.83 |
| 21 | rc_AA236476_at | AA236476 | transmembrane protein TENB2, | 5.1 | −3.13 |
| 22 | rc_AA028092_s_at | AA028092 | transcription factor 21 | 5.1 | −5.24 |
| 23 | rc_T90619_f_at | T90619 | actin, gamma 1 | 5.0 | −2.19 |
| 24 | J00123_at | J00123 | proenkephalin | 5.0 | −3.96 |
| 25 | X52541_at | X52541 | early growth response 1 | 4.9 | −5.78 |
| 26 | rc_AA620825_at | AA620825 | CGI-43 protein | 4.9 | −4.59 |
| 27 | rc_AA424530_s_at | AA424530 | ESTs | 4.9 | −5.42 |
| 28 | rc_AA386386_s_at | AA386386 | procollagen-proline, 2-oxoglutarate | 4.9 | −2.64 |
| | | | 4-dioxygenase (proline 4-hydroxylase), | | |
| | | | beta polypeptide (protein disulflde | | |
| | | | isomerase; thyroid hormone binding | | |
| | | | protein p55) | | |
| 29 | U62015_at | U62015 | cysteine-rich, angiogenic inducer, 61 | 4.9 | −6.24 |
| 30 | rc_AA188981_at | AA188981 | highly expressed in cancer, rich in | 4.9 | −6.67 |
| | | | leucine heptad repeats | | |
| 31 | rc_H21814_f_at | H21814 | immunoglobulin lambda locus | 4.9 | −2.67 |
| 32 | M60314_at | M60314 | bone morphogenetic protein 5 | 4.7 | −10.82 |
| 33 | rc_T67053_f_at | T67053 | immunoglobulin lambda locus | 4.7 | −2.84 |
| 34 | rc_N47686_s_at | N47686 | solute carrier family 14 (urea trans- | 4.7 | −3.27 |
| | | | porter), member 1 (Kidd blood group) | | |
| 35 | rc_AA436616_at | AA436616 | ESTs | 4.7 | −6.34 |
| 36 | rc_H60595_s_at | H60595 | progesterone binding protein | 4.7 | −2.66 |
| 37 | rc_H88338_at | H88338 | ESTs | 4.7 | −7.93 |
| 38 | M33653_at | M33653 | collagen, type XIII, alpha 1 | 4.6 | −8.95 |
| 39 | rc_N30198_at | N30198 | ESTs | 4.5 | −5.87 |
| 40 | D83018_at | D83018 | nel (chicken)-like 2 | 4.5 | −9.79 |
| 41 | rc_Z39904_at | Z39904 | ESTs | 4.5 | −6.27 |
| 42 | H61295_s_at | H61295 | CD4 antigen (p55) | 4.4 | −4.49 |
| 43 | rc_AA281345_f_at | AA281345 | immediate early protein | 4.3 | −6.62 |
| 44 | rc_T23490_s_at | T23490 | hypothetical protein FLJ20185 | 4.2 | −5.25 |
| 45 | rc_AA279760_at | AA279760 | DKFZP564M182 protein | 4.2 | −3.73 |
| 46 | rc_R25410_at | R25410 | ESTs | 4.2 | −4.69 |
| 47 | rc_T03229_f_at | T03229 | ESTs | 4.2 | −3.37 |
| 48 | rc_R93908_at | R93908 | ESTs | 4.2 | −3.39 |
| 49 | AA374109_at | AA374109 | spondin 2, extracellular matrix protein | 4.2 | −1.97 |
| 50 | rc_R45654_at | R45654 | collagen, type XIII, alpha 1 | 4.2 | −5.69 |
| 51 | rc_H86112_f_at | H86112 | KIAA0471 gene product | 4.1 | −4.00 |
| 52 | rc_AA257093_r_at | AA257093 | T cell receptor beta locus | 4.1 | −7.77 |
| 53 | rc_AA456147_at | AA456147 | general transcription factor IIIA | 4.1 | −6.23 |
| 54 | U21128_at | U21128 | lumican | 4.1 | −6.15 |
| 55 | rc_AA057195_at | AA057195 | TNF? elastin microfibril interface | 4.1 | −2.22 |
| | | | located protein | | |
| 56 | M63438_s_at | M63438 | immunoglobulin kappa variable 1D-8 | 4.0 | −2.53 |
| 57 | M57466_s_at | M57466 | major histocompatibility complex, | 4.0 | −3.91 |
| | | | class II, DP beta 1 | | |
| 58 | rc_AA443923_at | AA443923 | cat eye syndrome critical region gene 1 | 4.0 | −3.01 |
| 59 | rc_N39415_at | N39415 | DKFZP586P2421 protein | 4.0 | −5.70 |
| 60 | rc_W67225_at | W67225 | KIAA0592 protein | 4.0 | −3.35 |
| 61 | M62831_at | M62831 | immediate early protein | 4.0 | −6.39 |
| 62 | rc_AA404957_at | AA404957 | matrix Gla protein | 4.0 | −3.84 |
| 63 | rc_F02992_at | F02992 | ESTs | 4.0 | −3.65 |
| 64 | U69263_at | U69263 | matrilin 2 | 3.9 | −4.84 |
| 65 | rc_AA448625_at | AA448625 | slit (Drosophila) homolog 3 | 3.9 | −4.13 |
| 66 | X57025_at | X57025 | insulin-like growth factor 1 | 3.9 | −3.93 |
| | | | (somatomedin C) | | |
| 67 | AA151544_at | AA151544 | matrix metalloproteinase 23B | 3.8 | −5.54 |
| 68 | rc_F13763_at | F13763 | ESTs | 3.8 | −6.39 |
| 69 | rc_AA436655_at | AA436655 | hypothetical protein FLJ10781 | 3.8 | −5.13 |
| 70 | M87789_s_at | M87789 | immunoglobulin heavy constant gamma | 3.8 | −3.93 |
| | | | 3 (G3m marker) | | |
| 71 | L44416_at | L44416 | DEAD/H (Asp-Glu-Ala-Asp/His) box | 3.8 | −1.75 |
| | | | polypeptide 17 (72kD) | | |
| 72 | U20350_at | U20350 | chemokine (C-X3-C) receptor 1 | 3.8 | −6.50 |
| 73 | rc_AA449749_at | AA449749 | ESTs | 3.8 | −4.52 |
| 74 | rc_W73790_f_at | W73790 | immunoglobulin lambda-like | 3.7 | −2.95 |
| | | | polypeptide 1 | | |
| 75 | rc_AA281145_at | AA281145 | ESTs | 3.7 | −1.77 |
| 76 | rc_f09748_s_at | f09748 | ESTs | 3.7 | −4.12 |
| 77 | rc_T64211_at | T64211 | HNOEL-iso protein | 3.7 | −5.35 |
| 78 | rc_N80152_at | N80152 | RNA binding motif protein 6 | 3.7 | −2.40 |
| 79 | rc_AA436618_at | AA436618 | microtubule-associated protein 2 | 3.7 | −4.67 |
| 80 | T85532_f_at | T85532 | ESTs | 3.7 | −1.90 |
| 81 | rc_AA398280_at | AA398280 | ESTs | 3.6 | −3.11 |
| 82 | rc_T23468_at | T23468 | CGI-119 protein | 3.6 | −4.67 |
| 83 | AA195678_at | AA195678 | actin binding protein; macrophin | 3.6 | −3.48 |
| | | | (microfilament and actin filament | | |
| | | | cross-linker protein) | | |
| 84 | AB002335_at | AB002335 | KIAA0337 gene product | 3.6 | −4.21 |
| 85 | rc_AA598982_s_at | AA598982 | KIAA1114 protein, trophinin | 3.6 | −4.58 |
| 86 | J03507_at | J03507 | complement component 7 | 3.6 | −6.21 |
| 87 | J04130_s_at | J04130 | small inducible cytokine A4 | 3.5 | −4.76 |
| | | | (homologous to mouse Mip-1b) | | |
| 88 | AA495865_at | AA495865 | ESTs | 3.5 | −3.65 |
| 89 | HG3543-HT3739_at | HG3543-HT3739 | insulin-like growth factor 2 | 3.5 | −4.69 |
| | | | (somatomedin A) | | |
| 90 | rc_AA599662_s_at | AA599662 | KIAA0534 protein | 3.5 | −4.32 |
| 91 | rc_AA486072_i_at | AA486072 | small inducible cytokine A5 (RANTES) | 3.5 | −3.88 |
| 92 | rc_Z39983_s_at | Z39983 | KIAA0561 protein | 3.5 | −5.56 |
| 93 | rc_F02333_at | F02333 | hypothetical protein FLJ20093 | 3.5 | −2.23 |
| 94 | rc_AA151210_at | AA151210 | ESTs | 3.5 | −4.20 |
| 95 | rc_N92239_at | N92239 | Wnt inhibitory factor-1 | 3.5 | −3.06 |
| 96 | rc_AA173223_at | AA173223 | ESTs | 3.5 | −5.22 |
| 97 | rc_T86148_s_at | T86148 | pituitary tumor-transforming 1 | 3.5 | −2.15 |
| | | | interacting protein | | |
| 98 | AA214688_at | AA214688 | eukaryotic translation initiation | 3.5 | −3.13 |
| | | | factor 4B | | |
| 99 | rc_AA216589_at | AA216589 | ESTs | 3.5 | −4.40 |
| 100 | rc_AA446661_at | AA446661 | hypothetical protein FLJ10970 | 3.4 | −3.69 |
| 101 | AA082546_at | AA082546 | ESTs | 3.4 | −4.12 |
| 102 | rc_W46395_at | W46395 | chromobox homolog 6 | 3.4 | −2.41 |
| 103 | rc_AA401433_at | AA401433 | ESTs | 3.4 | −3.17 |
| 104 | D62965_at | D62965 | ESTs | 3.4 | −2.07 |
| 105 | rc_AA057829_s_at | AA057829 | growth arrest-specific 6 | 3.4 | −2.00 |
| 106 | rc_AA009755_at | AA009755 | ESTs | 3.3 | −4.77 |
| 107 | AA247204_at | AA247204 | DEAD/H (Asp-Glu-Ala-Asp/His) box | 3.3 | −2.85 |
| | | | polypeptide 16 | | |
| 108 | D13628_at | D13628 | angiopoietin 1 | 3.3 | −4.86 |
| 109 | rc_N59866_at | N59866 | ESTs | 3.3 | −4.39 |
| 110 | rc_AA406371_at | AA406371 | ESTs | 3.3 | −4.98 |
| 111 | rc_N67876_s_at | N67876 | insulin-like growth factor 1 | 3.3 | −3.06 |
| | | | (somatomedin C) | | |
| 112 | M84526_at | M84526 | D component of complement (adipsin) | 3.3 | −3.06 |
| 113 | rc_AA234095_at | AA234095 | hypothetical protein FLJ20701 | 3.3 | −3.78 |
| 114 | rc_D60074_s_at | D60074 | cadherin 10 (T2-cadherin) | 3.3 | −5.05 |
| 115 | rc_T49602_s_at | T49602 | ESTs | 3.3 | −3.36 |
| 116 | rc_n22006_s_at | n22006 | ESTs | 3.3 | −3.88 |
| 117 | rc_F04112_f_at | F04112 | ESTs | 3.3 | −3.26 |
| 118 | rc_T64223_s_at | T64223 | carboxypeptidase A3 (mast cell) | 3.3 | −2.97 |
| 119 | U23946_at | U23946 | RNA binding motif protein 5 | 3.2 | −3.48 |
| 120 | rc_M358038_at | AA358038 | SH3-binding domain glutamic acid-rich | 3.2 | −3.21 |
| | | | protein like | | |
| 121 | rc_AA019433_at | AA019433 | ESTs | 3.2 | −3.88 |
| 122 | X03689_s_at | X03689 | eukaryotic translation elongation | 3.2 | −1.91 |
| | | | factor 1 alpha 1 | | |
| 123 | rc_H17550_at | H17550 | ESTs | 3.2 | −2.90 |
| 124 | rc_AA047880_at | AA047880 | prothymosin, alpha (gene sequence 28) | 3.2 | −5.88 |
| 125 | rc_AA084138_at | AA084138 | ESTs | 3.2 | −7.93 |
| 126 | rc_AA599365_at | AA599365 | decorin | 3.2 | −4.42 |
| 127 | rc_N91971_f_at | N91971 | retinol-binding protein 1, cellular | 3.2 | −4.13 |
| 128 | rc_T62873_at | T62873 | ESTs | 3.2 | −2.12 |
| 129 | rc_N49899_at | N49899 | ESTs | 3.2 | −3.73 |
| 130 | AA298981_at | AA298981 | fibulin 5 | 3.2 | −6.06 |
| 131 | rc_AA479286_at | AA479286 | ESTs | 3.2 | −3.54 |
| 132 | J04111_at | J04111 | v-jun avian sarcoma virus 17 oncogen | 3.2 | −5.47 |
| | | | homolog | | |
| 133 | rc_AA465491_at | AA465491 | Mad4 homolog | 3.2 | −2.75 |
| 134 | W28548_at | W28548 | ESTs | 3.2 | −3.59 |
| 135 | AA308998_at | AA308998 | endothelial differentiation-related | 3.2 | −2.89 |
| | | | factor 1 | | |
| 136 | rc_AA488432_at | AA488432 | phosphoserine phosphatase | 3.2 | −3.48 |
| 137 | rc_AA598991_at | AA598991 | amyloid beta (A4) precursor protein- | 3.1 | −4.51 |
| | | | binding, family A, member 2 (X11-like) | | |
| 138 | AA463311_at | AA463311 | hypothetical protein similar to mouse Fbw5 | 3.1 | −2.57 |
| 139 | rc_AA147224_at | AA147224 | ESTs | 3.1 | −4.41 |
| 140 | rc_AA609504_at | AA609504 | fibronectin leucine rich transmembrane | 3.1 | −3.81 |
| | | | protein 2 | | |
| 141 | U20734_s_at | U20734 | jun B proto-oncogene | 3.1 | −3.37 |
| 142 | U06863_at | U06863 | follistatin-like 1 | 3.1 | −2.48 |
| 143 | W51743_at | W51743 | ESTs | 3.1 | −2.95 |
| 144 | rc_AA465093_at | AA465093 | TIA1 cytotoxic granule-associated RNA- | 3.1 | −5.34 |
| | | | binding protein | | |
| 145 | rc_AA219100_at | AA219100 | DKFZP586P2421 protein | 3.1 | −4.09 |
| 146 | rc_R42424_at | R42424 | ESTs | 3.1 | −3.82 |
| 147 | rc_W73038_at | W73038 | ESTs | 3.1 | −2.23 |
| 148 | AA091278_at | AA091278 | hypothetical protein FLJ10793 | 3.1 | −2.75 |
| 149 | rc_AA620289_at | AA620289 | PRO0518 protein | 3.1 | −2.55 |
| 150 | rc_AA149579_at | AA149579 | prostate cancer associated protein 1 | 3.1 | −2.66 |
| 151 | M21121_at | M21121 | small inducible cytokine A5 (RANTES) | 3.1 | −4.97 |
| 152 | rc_AA427890_at | AA427890 | ESTs | 3.1 | −4.32 |
| 153 | M34516_r_at | M34516 | immunoglobulin lambda-like | 3.1 | −3.47 |
| | | | polypeptide 1 | | |
| 154 | rc_AA233347_at | AA233347 | zinc finger protein 216 | 3.1 | −2.43 |
| 155 | rc_W74533_at | W74533 | latrophilin | 3.1 | −3.51 |
| 156 | rc_AA029597_at | AA029597 | bone morphogenetic protein 7 | 3.1 | −3.80 |
| | | | (osteogenic protein 1) | | |
| 157 | rc_N91887_s_at | N91887 | thymosin, beta, identified in | 3.1 | −4.47 |
| | | | neuroblastoma cells | | |
| 158 | rc_AA205724_at | AA205724 | ESTs | 3.0 | −6.70 |
| 159 | U30521_at | U30521 | P311 protein | 3.0 | −6.06 |
| 160 | X07109_at | X07109 | protein kinase C, beta 1 | 3.0 | −4.90 |
| 161 | D82346_at | D82346 | potassium voltage-gated channel, | 3.0 | −3.49 |
| | | | KQT-like subfamily, member 2 | | |
| 162 | rc_AA478962_at | AA478962 | ESTs | 3.0 | −3.35 |
| 163 | rc_AA151428_s_at | AA151428 | matrix metalloproteinase 23A,matrix | 3.0 | −2.78 |
| | | | metalloproteinase 23B | | |
| 164 | rc_AA130349_at | AA130349 | ESTs | 3.0 | −2.01 |
| 165 | M18737_rna1_at | M18737 | granzyme A (granzyme 1, cytotoxic T- | 3.0 | −5.90 |
| | | | lymphocyte-associated serine | | |
| | | | esterase 3) | | |
| 166 | rc_N91461_at | N91461 | ESTs | 3.0 | −3.43 |
| 167 | rc_AA045481_at | AA045481 | ESTs | 3.0 | −3.70 |
| 168 | U91903_at | U91903 | frizzled-related protein | 3.0 | −4.73 |
| 169 | U19495_s_at | U19495 | stromal cell-derived factor 1 | 3.0 | −4.38 |
| 170 | M33493_s_at | M33493 | tryptase, alpha, tryptase, beta | 3.0 | −3.12 |
| | | | (tryptase II) | | |
| 171 | Y12711_at | Y12711 | progesterone binding protein | 3.0 | −2.33 |
| 172 | rc_N58172_at | N58172 | ESTs | 3.0 | −2.53 |
| 173 | M12529_at | M12529 | apolipoprotein E | 3.0 | −1.92 |
| 174 | rc_AA412505_at | AA412505 | ESTs | 3.0 | −3.35 |
| 175 | U45955_at | U45955 | glycoprotein M6B | 3.0 | −4.09 |
| 176 | rc_H56673_at | H56673 | ESTs | 3.0 | −4.25 |
| 177 | L33799_at | L33799 | procollagen C-endopeptidase enhancer | 3.0 | −4.72 |
| 178 | rc_Z40186_at | Z40186 | ESTs | 3.0 | −2.22 |
| 179 | AA094800_at | AA094800 | eukaryotic translation initiation | 2.9 | −2.56 |
| | | | factor 3, subunit 7 (zeta, 66/67kD) | | |
| 180 | D21063_at | D21063 | minichromosome maintenance deficient | 2.9 | −5.27 |
| | | | (S. cerevisiae) 2 (mitotin) | | |
| 181 | rc_AA412049_at | AA412049 | ESTs | 2.9 | −2.63 |
| 182 | rc_AA599661_at | AA599661 | ESTs | 2.9 | −8.62 |
| 183 | L02870_s_at | L02870 | collagen, type VII, alpha 1 | 2.9 | −4.69 |
| | | | (epidermolysis bullosa, dystrophic, | | |
| | | | dominant and recessive) | | |
| 184 | rc_AA232266_s_at | AA232266 | ESTs | 2.9 | −3.22 |
| 185 | L02321_at | L02321 | glutathione S-transferase M5 | 2.9 | −3.33 |
| 186 | rc_AA428325_at | AA428325 | SEC14 (S. cerevisiae)-like 2 | 2.9 | −3.52 |
| 187 | D82534_at | D82534 | f-box and leucine-rich repeat protein 5 | 2.9 | −2.20 |
| 188 | rc_T32113_at | T32113 | KIAA0657 protein | 2.9 | −2.47 |
| 189 | rc_R10896_at | R10896 | cytochrome c oxidase subunit VIIa | 2.9 | −1.99 |
| | | | polypeptide 2 like | | |
| 190 | rc_AA019034_i_at | AA019034 | ESTs | 2.9 | −4.40 |
| 191 | D28423_at | D28423 | ESTs | 2.9 | −2.31 |
| 192 | rc_AA609943_at | AA609943 | ESTs | 2.9 | −3.86 |
| 193 | W69302_at | W69302 | ESTs | 2.9 | −2.68 |
| 194 | rc_H01824_f_at | H01824 | GATA-binding protein 2 | 2.9 | −3.82 |
| 195 | rc_T67105_s_at | T67105 | ESTs | 2.9 | −5.49 |
| 196 | rc_AA426372_s_at | AA426372 | H1 histone family, member X | 2.9 | −2.53 |
| 197 | rc_T98288_f_at | T98288 | ESTs | 2.9 | −2.66 |
| 198 | rc_N63047_at | N63047 | ESTs | 2.9 | −5.25 |
| 199 | U57316_at | U57316 | GCN5 (general control of amino-acid | 2.9 | −3.59 |
| | | | synthesis, yeast, homolog)-like 2 | | |
| 200 | rc_AA219304_s_at | AA219304 | alpha-2-macroglobulin | 2.9 | −1.76 |

[0138] TABLE 4
Normal vs. BPH W/Symptoms Table

| down- | | | | | |
|---|---|---|---|---|---|
| regu- | | GenBank | | Fold- | |
| lated | Affy element | ID | GenBank Name | change | t |
| 1 | rc_T40895_at | T40895 | protein tyrosine phosphatase | 16.5 | 5.19 |
| | | | type IVA, member 1 | | |
| 2 | rc_N80129_i_at | N80129 | metallothionein 1L | 12.6 | 3.54 |
| 3 | rc_AA460914_at | AA460914 | ESTs | 7.4 | 4.58 |
| 4 | rc_AA234996_s_at | AA234996 | cytochrome c oxidase subunit | 7.2 | 4.10 |
| | | | VIa polypeptide 2 | | |
| 5 | X66141_at | X66141 | myosin, light polypeptide 2, | 6.6 | 3.80 |
| | | | regulatory, cardiac, slow | | |
| 6 | AA234634_f_at | AA234634 | CCAAT/enhancer binding | 6.2 | 4.35 |
| | | | protein (C/EBP), delta | | |
| 7 | rc_AA419011_at | AA419011 | prostate androgen-regulated | 6.1 | 3.87 |
| | | | transcript 1 | | |
| 8 | rc_N94303_at | N94303 | ESTs | 5.8 | 5.96 |
| 9 | M20543_at | M20543 | actin, alpha 1, skeletal | 5.5 | 3.20 |
| | | | muscle | | |
| 10 | rc_AA085943_s_at | AA085943 | troponin T1, skeletal, slow | 5.5 | 3.02 |
| 11 | X06825_at | X06825 | tropomyosin 2 (beta) | 5.2 | 3.35 |
| 12 | AB000584_at | AB000584 | prostate differentiation | 5.1 | 3.80 |
| | | | factor | | |
| 13 | M19309_s_at | M19309 | troponin T1, skeletal, slow | 5.0 | 3.41 |
| 14 | rc_AA040433_at | AA040433 | DKFZP586N2124 protein | 5.0 | 2.62 |
| 15 | rc_N32748_at | N32748 | ESTs | 5.0 | 3.36 |
| 16 | rc_AA227926_at | AA227926 | ESTs | 4.8 | 5.39 |
| 17 | rc_AA457566_at | AA457566 | ESTs | 4.7 | 4.22 |
| 18 | rc_AA026641_s_at | AA026641 | secretory leukocyte protease | 4.6 | 2.09 |
| | | | inhibitor (antileukoproteinase) | | |
| 19 | rc_AA053424_at | AA053424 | serine/threonine protein | 4.5 | 4.16 |
| | | | kinase MASK | | |
| 20 | V00594_at | V00594 | metallothionein 2A | 4.5 | 3.71 |
| 21 | rc_R16983_at | R16983 | ESTs | 4.5 | 3.23 |
| 22 | U75272_s_at | U75272 | progastricsin (pepsinogen C) | 4.4 | 4.57 |
| 23 | rc_T94447_s_at | T94447 | cortic at thymocyte receptor | 4.4 | 3.50 |
| | | | (X. laevis CTX) like | | |
| 24 | U08021_at | U08021 | nicotinamide N- | 4.4 | 2.41 |
| | | | methyltransferase | | |
| 25 | J03910rna1_at | J03910 | metallothionein 1G | 4.3 | 2.79 |
| 26 | rc_AA236545_at | AA236545 | ESTs | 4.2 | 2.41 |
| 27 | rc_AA211443_at | AA211443 | ESTs | 4.2 | 4.49 |
| 28 | rc_AA398908_at | AA398908 | ESTs | 4.2 | 2.64 |
| 29 | X57129_at | X57129 | H1 histone family, member 2 | 4.2 | 3.88 |
| 30 | M21665_s_at | M21665 | myosin, heavy polypeptide 7, | 4.1 | 3.61 |
| | | | cardiac muscle, beta | | |
| 31 | X65614_at | X65614 | S100 calcium-binding protein | 4.1 | 4.03 |
| | | | P | | |
| 32 | rc_AA197112_r_at | AA197112 | putative nuclear protein | 4.1 | 3.07 |
| 33 | M99487_at | M99487 | folate hydrolase (prostate- | 4.0 | 2.65 |
| | | | specific membrane antigen) 1 | | |
| 34 | X04201_at | X04201 | neurotrophic tyrosine kinase, | 3.9 | 2.87 |
| | | | receptor, type 1 | | |
| 35 | X05451_s_at | X05451 | ESTs | 3.9 | 3.26 |
| 36 | rc_AA435720_i_at | AA435720 | tubulin, alpha 2 | 3.9 | 2.20 |
| 37 | rc_N92502_s_at | N92502 | ESTs | 3.8 | 3.11 |
| 38 | L77701_at | L77701 | COX17 (yeast) homolog, | 3.8 | 3.97 |
| | | | cytochrome c oxidase | | |
| | | | assembly protein | | |
| 39 | HG2157-HT2227_at | HG2157-HT2227 | ESTs | 3.8 | 4.08 |
| 40 | X76717_at | X76717 | metallothionein 1L | 3.8 | 5.82 |
| 41 | HG1067-HT1067_r_at | HG1067-HT1067 | ESTs | 3.7 | 3.02 |
| 42 | rc_AA599331_at | AA599331 | CGI-119 protein, | 3.6 | 4.90 |
| | | | uncharacterized bone marrow | | |
| | | | protein BM039 | | |
| 43 | M20642_s_at | M20642 | ESTs | 3.6 | 3.48 |
| 44 | rc_AA055163_at | AA055163 | calsequestrin 2, cardiac | 3.6 | 3.66 |
| | | | muscle | | |
| 45 | rc_AA127946_at | AA127946 | DKFZP586B2022 protein | 3.6 | 4.40 |
| 46 | rc_AA022886_at | AA022886 | retinal degeneration B beta | 3.6 | 3.51 |
| 47 | rc_AA342337_at | AA342337 | ESTs | 3.5 | 2.57 |
| 48 | X02544_at | X02544 | orosomucoid 1 | 3.5 | 1.92 |
| 49 | rc_T73433_s_at | T73433 | angiotensinogen | 3.5 | 3.10 |
| 50 | M21494_at | M21494 | creatine kinase, muscle | 3.4 | 2.46 |
| 51 | rc_AA488072_s_at | AA488072 | cardiac ankynn repeat protein | 3.4 | 2.78 |
| 52 | rc_AA293187_s_at | AA293187 | B-cell CLL/lymphoma 3 | 3.4 | 1.62 |
| 53 | rc_AA599522_r_at | AA599522 | squamous cell carcinoma | 3.4 | 3.03 |
| | | | antigen recognised by T cells | | |
| 54 | rc_AA405488_at | AA405488 | ESTs | 3.4 | 2.57 |
| 55 | rc_AA461453_at | AA461453 | calcium binding protein | 3.4 | 3.10 |
| | | | Cab45 precursor, | | |
| 56 | rc_AA609006_at | AA609006 | ESTs | 3.4 | 2.30 |
| 57 | rc_N24761_at | N24761 | TU12B1-TY protein | 3.4 | 3.89 |
| 58 | rc_AA432162_at | AA432162 | DKFZP586B2022 protein | 3.4 | 2.78 |
| 59 | X06256_at | X06256 | integrin, alpha 5 | 3.4 | 4.51 |
| | | | (fibronectin receptor, alpha | | |
| | | | polypeptide) | | |
| 60 | rc_AA045825_at | AA045825 | ESTs | 3.3 | 3.90 |
| 61 | rc_AA478778_at | AA478778 | ESTs | 3.3 | 4.37 |
| 62 | rc_N80129_f_at | N80129 | metallothionein 1L | 3.2 | 3.60 |
| 63 | rc_AA182030_at | AA182030 | pyruvate dehydrogenase | 3.2 | 3.72 |
| | | | kinase, isoenzyme 4 | | |
| 64 | rc_AA102489_at | AA102489 | hypothetical protein FLJ10337 | 3.2 | 2.20 |
| 65 | rc_R46074_at | R46074 | transforming, acidic coiled- | 3.2 | 3.38 |
| | | | coil containing protein 2 | | |
| 66 | rc_AA599522_f_at | AA599522 | squamous cell carcinoma | 3.2 | 2.36 |
| | | | antigen recognised by T cells | | |
| 67 | rc_AA165313_at | AA165313 | ESTs | 3.2 | 2.76 |
| 68 | rc_AA429636_at | AA429636 | hexokinase 2 | 3.2 | 3.12 |
| 69 | rc_R71792_s_at | R71792 | thrombospondin 1 | 3.1 | 2.31 |
| 70 | U05861_at | U05861 | aldo-keto reductase family 1, | 3.1 | 2.62 |
| | | | member C1 (dihydrodiol | | |
| | | | dehydrogenase 1; 20-alpha | | |
| | | | (3-alpha)-hydroxysteroid | | |
| | | | dehydragenase),aldo-keto | | |
| | | | reductase family 1, member C2 | | |
| | | | (dihydrodiol dehydrogenase 2; | | |
| | | | bile acid binding | | |
| | | | protein, 3-alpha | | |
| | | | hydroxysteroid dehydrogenase, | | |
| | | | type III) | | |
| 71 | rc_AA410311_at | AA410311 | ESTs | 3.1 | 3.52 |
| 72 | rc_AA505136_at | AA505136 | ESTs | 3.1 | 3.00 |
| 73 | rc_T68873_f_at | T68873 | metallothionein 1L | 3.0 | 3.18 |
| 74 | X00371_rna1_at | X00371 | myoglobin | 3.0 | 2.18 |
| 75 | rc_AA099820_at | AA099820 | ESTs | 3.0 | 3.08 |
| 76 | rc_T90190_s_at | T90190 | H1 histone family, member 2 | 3.0 | 3.48 |
| 77 | rc_AA227936_f_at | AA227936 | parathymosin | 3.0 | 1.76 |
| 78 | X90568_at | X90568 | titin | 3.0 | 2.83 |
| 79 | rc_AA004699_at | AA004699 | orphan G-protein coupled | 3.0 | 2.23 |
| | | | receptor | | |
| 80 | rc_F03969_at | F03969 | ESTs | 2.9 | 2.53 |
| 81 | X93036_at | X93036 | FXYD domain-containing ion | 2.9 | 2.91 |
| | | | transport regulator 3 | | |
| 82 | rc_R91484_at | R91484 | ESTs | 2.9 | 6.43 |
| 83 | rc_AA025370_at | AA025370 | KIAA0872 protein | 2.9 | 2.87 |
| 84 | X51441_s_at | X51441 | serum amyloid A1 | 2.9 | 1.78 |
| 85 | X64177_f_at | X64177 | metallothionein 1H | 2.9 | 3.36 |
| 86 | rc_AA255480_at | AA255480 | ECSIT | 2.9 | 2.38 |
| 87 | rc_AA476944_at | AA476944 | ESTs | 2.8 | 4.26 |
| 88 | U78294_at | U78294 | arachidonate 15-lipoxygenase, | 2.8 | 1.82 |
| | | | second type | | |
| 89 | rc_AA045487_at | AA045487 | ESTs | 2.8 | 2.75 |
| 90 | rc_N74291_at | N74291 | ESTs | 2.8 | 1.88 |
| 91 | rc_N91973_at | N91973 | hypothetical protein, three | 2.8 | 1.97 |
| | | | prime repair exonuclease 1 | | |
| 92 | D81655_at | D81655 | ESTs | 2.8 | 1.89 |
| 93 | U53225_at | U53225 | sorting nexin 1 | 2.8 | 3.16 |
| 94 | rc_H77597_f_at | H77597 | metallothionein 1H | 2.8 | 2.98 |
| 95 | K02215_at | K02215 | angiotensinogen | 2.8 | 3.05 |
| 96 | rc_AA464728_s_at | AA464728 | ESTs | 2.7 | 3.80 |
| 97 | rc_W49708_at | W49708 | ESTs | 2.7 | 3.52 |
| 98 | rc_AA453435_at | AA453435 | ESTs | 2.7 | 4.78 |
| 99 | rc_D11824_at | D11824 | ESTs | 2.7 | 3.70 |
| 100 | rc_T56281_f_at | T56281 | RNA helicase-related protein | 2.7 | 2.62 |
| 101 | rc_AA182882_at | AA182882 | titin-cap (telethonin) | 2.7 | 1.85 |
| 102 | rc_AA447522_at | AA447522 | ESTs | 2.7 | 3.27 |
| 103 | rc_N26904_at | N26904 | FK506 binding protein | 2.7 | 3.21 |
| | | | precursor | | |
| 104 | rc_AA131919_at | AA131919 | putative type II membrane | 2.7 | 4.15 |
| | | | protein | | |
| 105 | rc_R89840_at | R89840 | ESTs | 2.7 | 2.23 |
| 106 | rc_W31470_at | W31470 | thyroid hormone receptor- | 2.7 | 2.85 |
| | | | associated protein, 95-kD | | |
| | | | subunit | | |
| 107 | rc_W92207_at | W92207 | ESTs | 2.7 | 4.07 |
| 108 | U96094_at | U96094 | sarcolipin | 2.7 | 2.23 |
| 109 | rc_W70131_at | W70131 | ESTs | 2.7 | 3.64 |
| 110 | rc_AA435720_f_at | AA435720 | tubulin, alpha 2 | 2.7 | 1.98 |
| 111 | rc_AA284879_at | AA284879 | ESTs | 2.7 | 1.74 |
| 112 | rc_H22453_at | H22453 | ESTs | 2.7 | 4.20 |
| 113 | D14826_s_at | D14826 | cAMP responsive element | 2.6 | 4.13 |
| | | | modulator | | |
| 114 | rc_N93798_at | N93798 | protein tyrosine phosphatase | 2.6 | 3.12 |
| | | | type IVA, member 3 | | |
| 115 | U41804_at | U41804 | putative T1/ST2 receptor | 2.6 | 4.37 |
| | | | binding protein | | |
| 116 | rc_W20486_f_at | W20486 | chromosome 21 open reading | 2.6 | 2.74 |
| | | | frame 56 | | |
| 117 | rc_AA055768_at | AA055768 | CGI-119 protein | 2.6 | 2.13 |
| 118 | rc_AA447977_s_at | AA447977 | ESTs | 2.6 | 3.22 |
| 119 | AA380393_at | AA380393 | SEC7 homolog | 2.6 | 2.29 |
| 120 | rc_N29568_at | N29568 | thyroid hormone receptor- | 2.6 | 2.46 |
| | | | associated protein, 150 kDa | | |
| | | | subunit | | |
| 121 | rc_AA426374_f_at | AA426374 | tubulin, alpha 2 | 2.6 | 3.20 |
| 122 | rc_H94471_at | H94471 | occludin | 2.6 | 2.19 |
| 123 | rc_AA252219_at | AA252219 | ESTs | 2.6 | 3.83 |
| 124 | rc_AA402000_at | AA402000 | ESTs | 2.6 | 2.29 |
| 125 | rc_Z38744_at | Z38744 | putative gene product | 2.6 | 4.18 |
| 126 | AA045870_at | AA045870 | ESTs | 2.6 | 2.26 |
| 127 | rc_R38678_at | R38678 | ESTs | 2.6 | 4.16 |
| 128 | R39467_f_at | R39467 | NEU1 protein | 2.6 | 2.79 |
| 129 | AA455001_s_at | AA455001 | CGI-43 protein | 2.6 | 5.34 |
| 130 | rc_AA292328_at | AA292328 | activating transcription | 2.6 | 2.88 |
| | | | factor 5 | | |
| 131 | X57348_s_at | X57348 | stratifin | 2.6 | 2.48 |
| 132 | rc_T95005_s_at | T95005 | ESTs | 2.5 | 3.30 |
| 133 | AA410355_at | AA410355 | ribosomal protein S6 kinase, | 2.5 | 2.31 |
| | | | 70kD, polypeptide 2 | | |
| 134 | AA036900_at | AA036900 | ESTs | 2.5 | 2.45 |
| 135 | rc_F02204_at | F02204 | BAI1-associated protein 2 | 2.5 | 2.26 |
| 136 | U26173_s_at | U26173 | nuclear factor, interleukin | 2.5 | 3.91 |
| | | | 3 regulated | | |
| 137 | rc_AA477767_at | AA477767 | ESTs | 2.5 | 3.17 |
| 138 | rc_AA504805_s_at | AA504805 | interferon stimulated gene | 2.5 | 3.79 |
| | | | (20kD) | | |
| 139 | rc_R33627_i_at | R33627 | ESTs | 2.5 | 1.99 |
| 140 | rc_T40995_f_at | T40995 | alcohol dehydrogenase 3 | 2.5 | 2.15 |
| | | | (class I), gamma polypeptide | | |
| 141 | rc_R00144_at | R00144 | ESTs | 2.5 | 2.69 |
| 142 | U02020_at | U02020 | pre-B-cell colony-enhancing | 2.5 | 4.20 |
| | | | factor | | |
| 143 | rc_AA287832_at | AA287832 | ESTs | 2.5 | 3.80 |
| 144 | AA429539_f_at | AA429539 | hypothetical protein | 2.5 | 2.35 |
| 145 | rc_H05084_at | H05084 | GDP-mannose | 2.5 | 2.23 |
| | | | pyrophosphorylase B | | |
| 146 | rc_AA405616_at | AA405616 | ESTs | 2.5 | 3.33 |
| 147 | AA455381_at | AA455381 | aldehyde dehydrogenase 5 | 2.4 | 2.60 |
| | | | family, member A1 (succinate- | | |
| | | | semialdehyde dehydrogenase) | | |
| 148 | M13955_at | M13955 | keratin 7 | 2.4 | 2.22 |
| 149 | rc_AA180314_at | AA180314 | ESTs | 2.4 | 2.53 |
| 150 | M37984_rna1_at | M37984 | troponin C, slow | 2.4 | 2.10 |
| 151 | M61764_at | M61764 | tubulin, gamma 1 | 2.4 | 3.48 |
| 152 | rc_AA150920_at | AA150920 | KIAA0539 gene product | 2.4 | 4.11 |
| 153 | X65965_s_at | X65965 | superoxide dismutase 2, | 2.4 | 2.37 |
| | | | mitochondrial | | |
| 154 | X93510_at | X93510 | LIM domain protein | 2.4 | 2.39 |
| 155 | rc_N48056_s_at | N48056 | folate hydrolase (prostate- | 2.4 | 1.80 |
| | | | specific membrane antigen) 1 | | |
| 156 | rc_N26713_s_at | N26713 | ESTs | 2.4 | 3.87 |
| 157 | rc_AA282247_at | AA282247 | ESTs | 2.4 | 3.17 |
| 158 | rc_D80617_at | D80617 | KIAA0596 protein | 2.4 | 2.02 |
| 159 | rc_F02245_at | F02245 | monoamine oxidase A | 2.4 | 2.79 |
| 160 | rc_R58878_at | R58878 | ESTs | 2.4 | 2.80 |
| 161 | rc_W45531_at | W45531 | ESTs | 2.4 | 4.17 |
| 162 | L25270_at | L25270 | SMC (mouse) homolog, X | 2.4 | 3.26 |
| | | | chromosome | | |
| 163 | rc_W88568_at | W88568 | glycogenin 2 | 2.4 | 1.90 |
| 164 | rc_AA070752_s_at | AA070752 | insulin receptor substrate 1 | 2.4 | 2.87 |
| 165 | U24169_at | U24169 | JTV1 gene, hypothetical | 2.4 | 3.41 |
| | | | protein PRO0992 | | |
| 166 | rc_T15423_s_at | T15423 | 2′,3′-cyclic nucleotide | 2.4 | 1.71 |
| | | | 3′ phosphodiesterase | | |
| 167 | X78706_at | X78706 | carnitine acetyltransferase | 2.4 | 3.51 |
| 168 | rc_T10695_i_at | T10695 | enigma (LIM domain protein) | 2.4 | 1.52 |
| 169 | rc_AA430388_at | AA430388 | HSPC160 protein | 2.4 | 5.04 |
| 170 | M68519_rna1_at | M68519 | surfactant, pulmonary- | 2.4 | 3.89 |
| | | | associated protein A1 | | |
| 171 | rc_AA421562_at | AA421562 | anterior gradient 2 (Xenepus | 2.4 | 1.80 |
| | | | laevis) homolog | | |
| 172 | rc_T97243_at | T97243 | prenyl protein protease RCE1 | 2.4 | 2.46 |
| 173 | rc_T15409_f_at | T15409 | ESTs | 2.3 | 3.76 |
| 174 | rc_T62918_at | T62918 | ESTs | 2.3 | 2.59 |
| 175 | rc_R15108_at | R15108 | ESTs | 2.3 | 2.74 |
| 176 | AA454908_s_at | AA454908 | KIAA0144 gene product | 2.3 | 2.77 |
| 177 | rc_N64683_at | N64683 | CGI-119 protein | 2.3 | 2.27 |
| 178 | rc_H99035_at | H99035 | ESTs | 2.3 | 4.34 |
| 179 | Y08374_rna1_at | Y08374 | chitinase 3-like 1 (cartilage | 2.3 | 2.94 |
| | | | glycoprotein-39) | | |
| 180 | rc_AA236241_at | AA236241 | ESTs | 2.3 | 1.57 |
| 181 | U52969_at | U52969 | Purkinje cell protein 4 | 2.3 | 3.49 |
| 182 | rc_R11526_f_at | R11526 | parathymosin | 2.3 | 1.71 |
| 183 | rc_T15850_f_at | T15850 | ESTs | 2.3 | 2.42 |
| 184 | HG2259-HT2348_s_at | HG2259-HT2348 | tubulin, alpha 1 (testis | 2.3 | 2.91 |
| | | | specific), tubulin, alpha, | | |
| | | | ubiquitous | | |
| 185 | rc_H15143_s_at | H15143 | ortholog of rat pippin | 2.3 | 1.45 |
| 186 | rc_AA101767_at | AA101767 | ESTs | 2.3 | 3.52 |
| 187 | rc_AA193197_at | AA193197 | sarcomeric muscle protein | 2.3 | 1.98 |
| 188 | U03688_at | U03688 | cytochrome P450, subfamily I | 2.3 | 2.97 |
| | | | (dioxin-inducible), | | |
| | | | polypeptide 1 (glaucoma 3, | | |
| | | | primary infantile) | | |
| 189 | rc_R37774_at | R37774 | cytochrome P450 retinoid | 2.3 | 4.11 |
| | | | metabolizing protein | | |
| 190 | rc_H81413_f_at | H81413 | high-mobility group | 2.3 | 3.12 |
| | | | (nonhistone chromosomal) | | |
| | | | protein isoforms I and Y | | |
| 191 | X16354_at | X16354 | carcinoembryonic antigen- | 2.3 | 2.54 |
| | | | related cell adhesion | | |
| | | | molecule 1 (biliary | | |
| | | | glycoprotein) | | |
| 192 | rc_AA457235_at | AA457235 | ESTs | 2.3 | 2.25 |
| 193 | D13643_at | D13643 | KIAA0018 gene product | 2.3 | 1.78 |
| 194 | rc_N30856_at | N30856 | solute carrier family 19 | 2.3 | 3.45 |
| | | | (thiamine transporter), | | |
| | | | member 2 | | |
| 195 | M26311_s_at | M26311 | S100 calcium-binding protein | 2.3 | 2.37 |
| | | | A9 (calgranulin B) | | |
| 196 | rc_Z40556_at | Z40556 | CGI-96 protein | 2.3 | 2.39 |
| 197 | rc_N79070_at | N79070 | ESTs | 2.3 | 1.43 |
| 198 | Z69881_at | Z69881 | ATPase, Ca++ | 2.3 | 3.87 |
| | | | transporting, ubiquitous | | |
| 199 | rc_D60755_s_at | D60755 | ESTs | 2.3 | 2.30 |
| 200 | rc_N94424_at | N94424 | retinoic acid receptor | 2.2 | 1.09 |
| | | | responder (tazarotene | | |
| | | | induced) 1 | | |

[0139] TABLE 5

| Up-regulated genes | | Down-regulated genes | |
|---|---|---|---|
| Cluster | Fragment Name | Cluster | Fragment Name |
| 1 | rc_AA256268_at | 1 | rc_AA227926_at |
| 1 | rc_AA188981_at | 1 | rc_AA398908_at |
| 1 | rc_AA173223_at | 1 | L77701_at |
| 1 | rc_AA216589_at | 1 | rc_AA599331_at |
| 1 | rc_AA234095_at | 1 | AA455001_s_at |
| 1 | rc_H17550_at | 3 | rc_AA022886_at |
| 1 | AA308998_at | 3 | rc_N24761_at |
| 1 | rc_AA488432_at | 3 | X06256_at |
| 1 | rc_AA427890_at | 4 | HG1067-HT1067_r_at |
| 1 | rc_N91887_s_at | 4 | rc_AA127946_at |
| 1 | rc_AA045481_at | 4 | rc_AA405488_at |
| 3 | rc_T23622_at | 5 | AA234634_f_at |
| 3 | rc_T23490_s_at | 5 | X65614_at |
| 3 | rc_AA620289_at | 5 | rc_T73433_s_at |
| 4 | rc_H05704_r_at | 5 | rc_R91484_at |
| 4 | rc_AA436616_at | 5 | rc_N93798_at |
| 4 | rc_AA456147_at | 6 | rc_N94303_at |
| 4 | rc_f09748_s_at, | 6 | AB000584_at |
| | AA495865_at | | |
| 4 | rc_AA598982_s_at | 6 | rc_AA410311_at |
| 4 | HG3543-HT3739_at | 6 | rc_F02245_at |
| 4 | rc_AA609504_at | 7 | rc_T40895_at |
| 5 | rc_AA028092_s_at | 7 | rc_N80129_i_at, |
| | | | X76717_at, |
| | | | rc_N80129_f_at |
| | | | rc_T68873_f_at |
| 5 | U62015_at | 7 | rc_N32748_at |
| 5 | rc_F13763_at | 7 | V00594_at |
| 5 | rc_AA205724_at | 7 | J03910_rna1_at |
| 5 | U30521_at | 7 | X57129_at, |
| | | | rc_T90190_s_at |
| 6 | X52541_at | 7 | rc_AA182020_at |
| 6 | rc_AA281354_f_at, | 7 | rc_AA505136_at |
| | M62831_at | | |
| 7 | rc_n22006_s_at | 7 | X64177_f_at, |
| | | | rc_H77597_f_at |
| 7 | rc_R42424_at | 7 | rc_AA101767_at |

[0140] TABLE 6
Number of representative genes expressed
in prostatic tissues and cell lines

| | | Cell Line | | | |
|---|---|---|---|---|---|
| | Prostatic | BRF- | PZ- | | |
| | tissues | 55T | HPV7 | BPH-1 | LNCaP |
| Up-regulated | 61 | 33 | 22 | 20 | 20 |
| genes | | | | | |
| Down-regulated | 43 | 31 | 28 | 30 | 33 |
| genes | | | | | |
| Total | 104 | 64 | 50 | 50 | 53 |

We claim:

1. A method of screening for or identifying an agent that modulates the onset or progression of benign prostatic hyperplasia (BPH), comprising:
(a) preparing a first gene expression profile of BPH cells or BPH-like cell population;
(b) exposing the cells to the agent
(c) preparing second gene expression profile of the agent exposed cells; and
(d) comparing the first and second gene expression profiles.

2. A method of claim 1, wherein the gene expression profile comprises the expression levels for one or more genes that are differentially regulated in BPH cells compared to normal prostate cells.

3. A method of claim 1, wherein the agent modulates the expression levels for one or more genes in the BPH cells to levels close or similar to the expression level found in normal prostate cells.

4. A method of claim 1, wherein the gene expression profile comprises the expression levels in BPH cells for one or more genes in Tables 1-5.

5. A method of claim 1, wherein the gene expression profile comprises the expression levels in BPH cells for one or more genes in Table 5.

6. A method of any one of claims 1-5, wherein the BPH cell is selected from the group consisting of prostate cells from a BPH patient, a cell line in Table 6 and a derivative thereof.

7. A method of any one of claims 2-5, wherein the expression levels are for two or more genes.

8. A method of diagnosing the onset or progression of benign prostatic hyperplasia (BPH) in a subject comprising:
(a) detecting the expression levels of one or more genes in prostate cells from the subject that are differentially regulated compared to normal prostate cells.

9. A method of claim 8, wherein the expression levels are for one or more genes in Tables 1-5.

10. A method of claim 8, wherein the expression levels are for two or more genes in Tables 1-5.

11. A method of claim 8, wherein the expression levels are for one or more genes in Table 5.

12. A method of claim 8, wherein the expression levels are for two or more genes in Table 5.

13. A method of differentiating benign prostatic hyperplasia (BPH) from prostate cancer in a subject comprising:
(a) detecting the expression levels of one or more genes in prostate cells from the subject that are indicative of BPH rather than prostate cancer.

14. A method of claim 13, wherein the expression levels are for one or more genes in Tables 1-5.

15. A method of claim 13, wherein the expression levels are for two or more genes in Tables 1-5.

16. A method of claim 13, wherein the expression levels are for one or more genes in Table 5.

17. A method of claim 13, wherein the expression levels are for two or more genes in Table 5.

18. A set of oligonucleotide probes, wherein each of the probes specifically hybridizes to a gene in Tables 1-5.

19. A set of oligonucleotide probes, wherein each of the probes specifically hybridizes to a gene in Tables 5.

20. A set of oligonucleotide probes of claim 18, wherein the set specifically hybridizes to nearly all the genes in Tables 1-5.

21. A set of oligonucleotide probes of claim 18, wherein the set specifically hybridizes to nearly all the genes in Table 5.

22. A set of oligonucleotide probes of any one of claims 18-21, wherein the probes are attached to a solid support.

23. A set of oligonucleotide probes of claim 22, wherein the solid support is selected from the group consisting of a membrane, a glass support and a silicon support.

24. A solid support onto which two or more oligonucleotide probes have been attached, wherein each of the probes specifically hybridizes to a gene in Tables 1-5.

25. A solid support of claim 24, wherein the probes specifically hybridize to nearly all of the genes in Tables 1-5

26. A solid support onto which two or more oligonucleotide probes have been attached, wherein the probes specifically hybridize to a gene in Table 5.

27. A solid support of claim 26, wherein the probes specifically hybridize to nearly all of the genes in Table 5.

28. A solid support of any one of claims 24-27, wherein the solid support is an array comprising at least 10 different oligonucleotides in discrete locations per square centimeter.

29. A solid support of claim 28, wherein the array comprises at least 100 different oligonucleotides in discrete locations per square centimeter.

30. A solid support of claim 28, wherein the array comprises at least 1000 different oligonucleotides in discrete locations per square centimeter.

31. A solid support of claim 28, wherein the array comprises at least 10,000 different oligonucleotides in discrete locations per square centimeter.

32. A computer system comprising:
(a) a database containing information identifying the expression level in benign prostatic hyperplasia (BPH) tissue or cells of a set of genes comprising at least two genes in Tables 1-5; and
(b) a user interface to view the information.

33. A computer system of claim 32, wherein the set of genes comprises at least two genes in Table 5.

34. A computer system of claim 32, wherein the database further comprises sequence information for the genes.

35. A computer system of claim 32, wherein the database further comprises information identifying the expression level for the set of genes in normal prostate tissue or cells.

36. A computer system of claim 32, wherein the database farther comprises information identifying the expression level of the set of genes in prostate cancer tissue or cells.

37. A computer system of claim 32, further comprising records including descriptive information from an external database, which information correlates said genes to records in the external database.

38. A computer system of claim 37, wherein the external database is GenBank.

39. A method of using a computer system of claim 32 to present information identifying the expression levels in a tissue or cells of at least one gene in Tables 1-5, comprising the step of:
(a) comparing the expression level of at least one gene in Tables 1-5 in the tissue or cells to the level of expression of the gene in the database.

40. A method of claim 39, wherein the expression levels of at least two genes are compared.

41. A method of claim 39, wherein the expression levels of at least five genes are compared.

42. A method of claim 39, wherein the expression levels of at least ten genes are compared.

43. A method of claim 39, further comprising the step of displaying the expression levels of at lest one gene in the tissue or cell sample compared to the expression level in BPH.

44. A method of monitoring the treatment of a patient with benign prostatic hyperplasia (BPH), comprising:
(a) administering a pharmaceutical composition to the patient;
(b) preparing a gene expression profile from a cell or tissue sample from the patient; and
(c) comparing the patient gene expression profile to a gene expression profile from a normal prostate cells, or a BPH tissue or cell sample without treatment.

45. A method of claim 44, wherein the gene expression profile comprises the expression levels for one or more genes in Tables 1-5.

46. A method of claim 44, wherein the gene expression profile comprises the expression levels for one or more genes in Table 5.

47. A method of claim 45 or 46, wherein the expression levels are for two or more genes.

48. A method of any one of claims 1, 8, 12, 38 or 43, wherein the gene expression profile or gene expression level is detected by branched DNA (bDNA) method.

49. A computer readable storage medium storing a computer program for implementing an algorithm executing method of analyzing gene expression results; said method comprising:
(a) converting the mean expression value for each gene to 0; and
(b) converting the high and low expression values to 1 and −1, respectively.

50. The medium of claim 49, wherein the method further comprises the step of:
(c) clustering the converted expression values to identify sets of genes with similar expression patterns.

The application's sequence listing, which the Patent Office published only in electronic form, follows.

SEQUENCE LISTING (755 sequences)

SEQ ID NO: 1 - DNA, 333 bp, Homo sapiens
  Genbank Accession No. AA004699
ttaataaagcagaaatgtatttattaggcacccttgttcctcacagaggagcaagatccaggcctgagcgcctgggaagtctcttgaggttgcaggaatctccagagaaacataggcgctgcccagccaccaccccgagaacactatttgggctggagtgtgaccgccgaggtgatcctggcaggaggctggggttggctcctcgactccacaaacactgaggagtgggtggggacaccattgacacccacccaaacactggcagagagggaaggcccttccagattctggggcacatgttgctgggcctgccagggggaaggaggagcctgg

SEQ ID NO: 2 - DNA, 287 bp, Homo sapiens
  Genbank Accession No. AA007158
tttcacaaatgtcaattttattgacactagtgcacaactaaatacaataattgcaaaggaagtggaacgtgtcaaacagaaatggtgacaatgagttagaactgcagttgtttcaaggtactacactattatttaaaaaaaaaactcacaaaaagaaaaatgttatcactacaagtaggaattagaagagagaaatcctggcagtctgtctagaggttaaaacatttcatgcatttgtgagttgctgttggagagtttgttttttatttgtccaccgtaatctggca

SEQ ID NO: 3 - DNA, 468 bp, Homo sapiens
  Genbank Accession No. AA009755
  unsure (1)..(468): n = a or c or g or t
aggtacttcaaaagccacatttaattcaaaataaaatgagcatttctgacagatgacaacagtatgaaactgatttttttctttcctagatacaaaaatgatatggggcatttcttaacagtttagtaatcgtctaagaataattgtagaaataaccccaattccaccatcccagccactggtataaaacaaataccttccatgaaactgtctttcacataactaaaatatcctcacttacttggaacaatttcatgcttacacatgatcacaaacatttgtttttagatgttgtggaattactggagctgagatttctgaaacaatatctgaatcttagcagagagataataatcctttcactatacattgcttgggcttccttaaccaaatctgagtaactactggtaataataatgctggtggtagtccatgatactctcaaatttttccctttaagaaatatan

SEQ ID NO: 4 - DNA, 163 bp, Homo sapiens
  Genbank Accession No. AA017063
  unsure (1)..(163): n = a or c or g or t
cgcangatgancacttccgcgggggatgctcccggttgctctgcggagggcaggccgactcagggcggggtttggtcctgaaaaaatggggtggggcggttacctcttaccgcttgggaccttgggacctcttnttgaccccaggaagagattagaagccctt

SEQ ID NO: 5 - DNA, 196 bp, Homo sapiens
  Genbank Accession No. AA019034
tatctttacaaatgacagaatatttattaacaatacctttaaaaaagattacatatgctagatcactggtaaatatcatttacactggggttgggaactccctgggtgtcattttttttcgttcattttattattttgctgattttttttttgcatgtgattttaaattttatttcaacatagaagtaaccatatc

SEQ ID NO: 6 - DNA, 482 bp, Homo sapiens
  Genbank Accession No. AA019433
  unsure (1)..(482): n = a or c or g or t
tttttttttaagtaaaagaaaaagtgcggctgttaccaatctgaagtgggagcagccgcactttttttttttttttttaagtaaaagaaaatttattatgaaactaaaggaataaaagaatgaccactccataggcagagaaacgtcactttaaggttttgacatcaattgatttttgtccaaatcaataattactgcaatgattgaaaaatgattattactaagtttgttttcattgtctcaaggtctgctgaactctggatccaggctgtgtcaacagggtagtgtggtgcctcctgtacctgtcttggcctcctacagtcctttttacttattttgttttttagaattagagacagggtcttactatgttgctcagactgggnttcaaactcctaggctcaagcaatcttccagcctcagcctcctaaaagtgctggggattacaggcatgagccaccanacccgggccaagttctttt

SEQ ID NO: 7 - DNA, 245 bp, Homo sapiens
  Genbank Accession No. AA022886
  unsure (1)..(245): n = a or c or g or t
taaaaccccatgagatatttatataaagttactcagatttgggccgacatggcttatctgaagagtgcatgccgggtaaattcagggtggcttttttctcagggtctggaagtgtgagagtttctggggcagactttttccggggccgatctttgggaacggacagaaattcgggtgcgtctgtggagagaggggtggatggagcactagaaggcgcactgcggacngaaaaaaggccccccccg

SEQ ID NO: 8 - DNA, 337 bp, Homo sapiens
  Genbank Accession No. AA025370
ggatggaatacaatttccaatagtgtctaggccgacacccctccaccctcctttgcctgtcattcaagtcaataccctggagaaaagaggctgtgggggaggccatgttcgattaggaggtttaagagtccatcaaagtgtcatatgtgttaggtgtgaaatggcgacactgggaattactgttaataaggggtggctgcagcacggtgattgttatgagaacatccccaccgccccacttttgtttgaagactttcgtactgaactacatgttgtttactttcaacaacgtatacactacagttgacaaaagttaatctcggtgataagaatatgc

SEQ ID NO: 9 - DNA, 411 bp, Homo sapiens
  Genbank Accession No. AA026641
  unsure (1)..(411): n = a or c or g or t
tttntntgcaaagagaaataggctcgtttattnattcattgatcaactggcacttcttgaaancctgctgtgtgccaagcctttccccaaaggaggatatcagtgnnnnagnaagtctcagggtggaaaggacctggaccacacagagcaggactccagagcctcctccatatggcaggaatcaagctttcacaggggaaacgcaggatttcccacacatgcccatgcaacacttcaagtcacgcttgcactggccatccatctcacagaaattgggggggttnagcatcnaacattggccanaantcactnggnacttnccaagggttncnccttgttgggnttnggggggtnnacaggggncccggcanttnatgcnccaagtttcngggcaaanatttcttttttccc

SEQ ID NO: 10 - DNA, 471 bp, Homo sapiens
  Genbank Accession No. AA028092
tagcaatataaagaaagatttattttcaaaagtagcaaaacttgtttgaaaaaaatatatatctttaagtgaattactttataaatgtgactgtcaaagtcagctatcctatgatctacattttacaacatattgtacaaaagatacattgataggctcttatctatttatatatttataattacatattgcacttggaccagcaaggcttgcagagtcattcacggtagaagttaataaagttaaatagatgggaatctttgtaagtacaattgatctcctctggtttggaaacgaatctcctcgtcgttgtaaagtgttctcgcggggtgggacagagagaggagcattgcgagggggaagcagagacagagagcactgagggcaggggtcgccttcccggggcccgctccccccgggaggcggcctttcccagactcgcacctccaaggtcaggacgcggtggttcca

SEQ ID NO: 11 - DNA, 422 bp, Homo sapiens
  Genbank Accession No. AA029356
  unsure (1)..(422): n = a or c or g or t
gctctcagaggacaagaattatgttttattcatttgggagtacataggcggtatttaaacaatggtgctatcttaaacaccaaatatcaactgcagttcactttttccgtgtggggactaatatcaagatttcatatgaattatagtataatccagaagtatgaaaaaatacatcatatttaacttataaagcattcatctgcatgttataagatattacagtaaatacaattaggtacttaccattttatctttactttaaaaacaatgcctnttccaaaatataaaaaaaagacctatttttaaaganctatttaaagatngcttttgaaaacaacacttttatnttacnacaaatagatggtagtggcaacagcactcgtggatgtttacgngtaaataaaaatacctagtattccggg

SEQ ID NO: 12 - DNA, 253 bp, Homo sapiens
  Genbank Accession No. AA029597
gccagaaccaaacgtctccttttattgcaaggtcaaacccttttcattttgtctatttatacagaattttcactaaggactgctcgacgcaacagctgtgagtacattggtccaaccattaataaatagtcttaaataagaaaacaaacaggttgaaggaaagcaagctcatcgtcctgaacgagggattaaagggggggggtgttcaaaagagctttggatggaaataaataatctctttgctttgtaacac

SEQ ID NO: 13 - DNA, 186 bp, Homo sapiens
  Genbank Accession No. AA031360
  unsure (1)..(186): n = a or c or g or t
aaaatttaaaataaaattttattttatcttatactcaagttcagacaatagcatgtggtgtacattcaaaatttttgacaggtacagagcacattaaaaaatgaagacatgatcaaggagatgtaagagacaaatagacaacaacattctccctgaatctggaaaaaagcnagccnttagggtncc

SEQ ID NO: 14 - DNA, 206 bp, Homo sapiens
  Genbank Accession No. AA036900
  unsure (1)..(206): n = a or c or g or t
ctttgctaccttctgcttgttgagttgttttggcattcatattaaaagccagcatctcactatttattgacaggttgggctgtgtgtgtgcgcatgtgtgtatacatttccaggcgtgcctgtgtcctgtagctttttaaaaggaaacccagtcatcccactatgaatctggcatcttcttatgcttctagtgttttggccanaca

SEQ ID NO: 15 - DNA, 494 bp, Homo sapiens
  Genbank Accession No. AA039935
  unsure (1)..(494): n = a or c or g or t
ttcagtttttggtcattttaattgtaaaaaccaagacatttatataaataagaccgctgtgtaaaatacgattcacccttctacgaaaacccttttcccacactcgaaangaanatagaaaacccagcagagagcagtacaantcagcatgcggtcccngatagctgaagtctcgggcnggccagtggttccctgcggaanagccttcgtnggtgganagnactcctggcccaggtggncccaccagannntcnntgaccntctcnangagacttgcnaggtangcagctcccnnacaccagccccttgngtctcaantntacgggtccaaggaggggacgggaaaggctgcttggtccccaccaaggcttggggggctgggggggcctgctggcccagtgaagatgcagtggtctgttcagcctggggtcaagttgggggaaagggtttctgaggggtcagcacctccccagaggacaaggagagaagctgcn

SEQ ID NO: 16 - DNA, 421 bp, Homo sapiens
  Genbank Accession No. AA040433
  unsure (1)..(421): n = a or c or g or t
ttttgagggtaatgcaacttcttatttattaatatataataacaacaattatacagctcatatctgcaactgttaggtctttgttatgtcttggtcactttgtctggactggccgtgaccttcagctccagggtctgggctaggaagacgttccagtgaccttcgtgggggccagcgagcagtcggaagtgctgtgcctctttctggaagtcttgcttcctgactttcttgatctgagtcaagtggaagattctggctgtgtggccttggcagggtacttcacctctctgagcctcagtttcctcatcttttaccagcttccagaggtagatctccaccaagtccgaggcctcngtgttcccaggggcaaagcgacgnaggttngtctngggctttgggggataccggatgttttggacga

SEQ ID NO: 17 - DNA, 486 bp, Homo sapiens
  Genbank Accession No. AA040731
  unsure (1)..(486): n = a or c or g or t
ttccaagaagaacatttttctgtttattcttagaatgtgaattttttttttcaactcagggccaagtacaaacttttgatttttgaaattttttcaactcagggccaagtacaatcttttgatttaaaaattttttttcatgaacaaaccatcagtagttattaaggagcccaagaaataggagatgtgaaagcaggatttctttgtgtttcctttgaatgttgttattttgagtattatcattatcaggtagaggaagaaaggtaggctgggaagtaggtccttatgatatcttgactatggatcccagatttacatttcacctngtcacagagcacacataatttaagataaacatgtcaagaatgacataaaccagaggtaaacaccaaggagctttacatttggaaccngaaaataaaaattagaaaaattattaccccatattaataaccaaaaaattacttaaactcctaggnccccngg

SEQ ID NO: 18 - DNA, 546 bp, Homo sapiens
  Genbank Accession No. AA043349
cttttatgcagagtttgattatgctttatttttaaaaatcacattcttccccattcccagccaacgaacaacactattcattctgaaataagaaaatgaaagaattttgagaagtcacacaacattgctgtaaatttcattttttttttttttactaataaaacagatgcttctttctcagagatgggttttcactttcaacatgcgtcatagcatctgattttctgagccatcttgggaaatggagtctttcctaatgtcattgaatgtggtcaaagctatctacaaagcagagacagtaggctcttggtgaatcagtttgggaaattcacaattaagcagtctcagggagtgaaattccggggtctgatgagactgtggaaaccatgtggtactgtagggagagcacaggtttggatgccagacaaatatctaaatctaaccctaatccactgcttataagcttagtgattgttgcacaagttgtttagcttctctgagcttagatacctcactgtaaaatgggaataatacctctttttagtg

SEQ ID NO: 19 - DNA, 353 bp, Homo sapiens
  Genbank Accession No. AA043777
  unsure (1)..(353): n = a or c or g or t
gaagttataaaagcttgtttttctttattagaatacttttttcaattctgatttgtcacaatttagattctttttctaagaataagcagaaatttacaaaatttaatttttatttatacattcatccgttcaatacacatttcaagaaagctgtattgnaccccttnnagtnggtaagttccagggccaaagaaccaaaataaatccaaggagagagaccaacaaatgtatatttataacacagagtaataaaacacaaataaatgtggagttatttaagcatgtaagatggtacatgctctaccaaggtatgggggcttctctaagacacaagatcagattaaagtcttgaa

SEQ ID NO: 20 - DNA, 382 bp, Homo sapiens
  Genbank Accession No. AA044219
  unsure (1)..(382): n = a or c or g or t
ttgcggggaatcaggtaggggcctttattggccagcacacatctacctcctggcatctgtcacaagcatttgcaggagtaggcggccccttcctctccatgtccccatccccaacctgagatgcgggagggcctgggggctcagagggaagaactgaggcaagaagccccggtgatccagtcagaggattgggcagcctgacctcggggtggggagccagcactngacaacaaggagggaggggcacaggagggctccccgaggtttggtccgggagggggaggaaaactgccccctgcnctgtcaatctctgcaatgtgccgagccccagctccttgantccctcagtgcctttgggcctggatgctcaganagcagttga

SEQ ID NO: 21 - DNA, 428 bp, Homo sapiens
  Genbank Accession No. AA045481
  unsure (1)..(428): n = a or c or g or t
tttttttcagtaatacagatgtctattttattaaaaaagttacaaacaggtggactgcagggtcgtcttacaaaatgacaagaatgaaatctattggaaaaattttacttttacaaatctttataggtaattgttcaatgtttgtacttgttatttgagattttacctttcactgataaagttacagtacattagatccatgataataggttacattattttatttgcagagccctactgcagtgatttgaacaactcctaaatagatgccataataaagacaagacatatattgcatttaatattaatttattatcctaataagcaacatgcaatctattgaggaagctaaaataacttttggtcccctttcttaaaatgtgctggagaaaccacccttaaaatcactttcccccggattccngcga

SEQ ID NO: 22 - DNA, 328 bp, Homo sapiens
  Genbank Accession No. AA045487
ggaaagcattttcaaactttatttacaactgtcacagtgacaaaaagtagtttggaaaaaaaaaaatgctagtttctccctgagcctcaaaaaagaacagatagaagttacaggaggttcatctcacaacaggcatttttactgaaatactaggaattttttcaatacaatcagttagaaatacacacaaattacttgaaaaaaaaaaaaagaggaggccagataggagctcagccacttgtccaagagcagctgggtccccccagcaggctccaccgctgagggtcctgacattagctgtcagcccctggcctgctcagactggcaa

SEQ ID NO: 23 - DNA, 402 bp, Homo sapiens
  Genbank Accession No. AA045503
ctgtgagactgtcctttattgtgtatacaggttccagcgtcagggctctcccacggccccctccccagtcctcccccaagggcccagagtggtgggagtgagaggccaccctaaggcacactgaccagagaggcatggagggaggaggctgacttgccctggggacccctgctaactgagacccacccttcccctccaccctgcttctgtatgtgggagacgaaaccaagagtcactgggggcagcaggcatttcccagggttaaggctgatggaaggtccctatcccagatgggagatgggggcttttcctatgactccccccatcccccagctggaagacgtggggaggggtgcatagccttagagaggtagaatgaggggaaatactcctcagtgccca

SEQ ID NO: 24 - DNA, 437 bp, Homo sapiens
  Genbank Accession No. AA045825
  unsure (1)..(437): n = a or c or g or t
cagtgtagaccgtctttattggcaggtgttaagagtgcaaaatatcaacaaacccaggggaatacgcaagggggtgggagtatggctcccctaccccatgtgagagccctgtaaccaagccagtggggtgggaacgttgacttgactgtngcaaattcaggctcagcaccttccaaagaacaagctcccaggcaggagggctccttgcaacacaagggggaaaggagtggcaccctggaagggcctgggctgcgacccaccctgggctgcttggctcctgtatactgcccacctcaacccctcaagaggaaggcttcacagctgggggtatgtagttcagagaacccgggctaaacccagccctccccaaacccaggttatctgcctcgggcctcagtttccctcctcccagtgattacccaagttgggcccatcag

SEQ ID NO: 25 - DNA, 397 bp, Homo sapiens
  Genbank Accession No. AA045870
  unsure (1)..(397): n = a or c or g or t
gtttagagtctaaaactaaaacctaatcatttngtcacagtgtaaaaacaaatggaaataacagctcaaatcttcaaaatattactatagcattatgtttaaaataatctacaacaaaaatgtaccattttcaagcagtactacattaggagcccttttatagaaaataatttcttctttacccccgttccagtgtgaatctagtattctgttaacatttgtgtggcatttggagtttgtcatccccattgaagggagagccttctcagacatgaagcaagggaaacatactgaatagttttacacaaatttgatctggcttccatttgnccccctcatttcccaaatgtttaaantgtattnggatttgggattctcaaatggtataagttggcct

SEQ ID NO: 26 - DNA, 564 bp, Homo sapiens
  Genbank Accession No. AA046426
  unsure (1)..(564): n = a or c or g or t
ttttttnttttttcactttatcatttactttttattgtgttgcttgaagtacctatgtaatgcaagtatgtactgtactaaaatacctatatttccaaataacatatgtggtgtagcccacagtctctgcagaagcatcatgagtaacctgtgcctttacactttacaatccgttattggttgctgttaaaagtatgataacagatgaagaaaaaaaaactaagtatgaatacacttttccaaacacgcacatacacagcttacaatggaatcccaatggaaataagtgacaacatctgatgtagaatctataaaatgtagactctgcaataaaaagccaaaggacgtaaaaatatattttaactttaaaaataacttagttacagtaatactttgcctgtgtcttaccaacatgtagctgacagtcaaaattttgcaatatagatataatatatagggatatataagaactacaagaaaatccccaaaacccataaagttcaaatgtgaaacagaaaagtttaacctggagattcgctatggtganctagccatatttggaag

SEQ ID NO: 27 - DNA, 560 bp, Homo sapiens
  Genbank Accession No. AA046840
  unsure (1)..(560): n = a or c or g or t
tacaaatactgtaaaaattaatataaaaaagtgagcatgctcagtcttttcctcttatctacaatacaaagggtttgtctgaaaagtctggttttttttctttttacaaatgtaccttagctgcatcaacaggagtaagatgtagaaaaagctaccattacaaaaataatttaagggaaaataaacacgtttagcttctctcgcagtttagtggtggtaagtccaggctgtagcttctttgcgctcctatgtcccaagaaactgcagcgggcacccggcggctctggctgcgcagggcagggcgcgctccgctccgggccgtcgggtctgaggtatgggtcgttgctgagtctctcccgccccggccgcgcgttaccggcagtctgctgtcccggcggccggcagaagggcgggctgggcagctgcttgaagaactgccggagggccaggtcccgcgtgantgctccacgcgctggtgcagttctcgtttcagcgacagctcacaactttgtgcantcctggttgcgccgcttggcttgtggggtttgcnacgggatgtt

SEQ ID NO: 28 - DNA, 464 bp, Homo sapiens
  Genbank Accession No. AA047151
  unsure (1)..(464): n = a or c or g or t
agaaaaaccaccatcgtgtcacgtcgacgatgccaaattatgttagcgtgacaganaacaccgtgggggaggaaggcagcagctgaagaaaaaagctcaaatgatctagtcactttcgatactgtacttcagatgcgaaatggatattcngagtggaaacctgacaaagtgcgcctgctttgatgtgaactggtatagacaatgaccagtggctgggtcagtgggatgtctctctgtgagcacaaaggcttatcaaatgacactaaagataagttcaacaaccatcacattggaagggagaaaggccgaacatttcatgtttggccgggcatgtgagtgcacaagatggaaagagcgattggagcatcctggtataattacccccattgtgctcttaatggaaatttcaaaggacgggagtattctgttggttggtgtccaggtttgtggcactgttccaagag

SEQ ID NO: 29 - DNA, 413 bp, Homo sapiens
  Genbank Accession No. AA047880
tacagagaatataaaaatacattcactttattttagaaaaatgaagactcatagagtaagcttatcacaaactggcctattaggagtcacagaattcacaggaaacaatttctgaagaccaggtgcctgctgccacctctccaagcaggccagagtccagtagagaatgcgattcaggaagatggctcctcagagggcagggaggttagctacggaggccgctcacgtggaaatgtccagtgaaccaatgccaaggaagaagataaaattctctggggctgaccacaacagtgggggtggataaagacaaaccacttgcctgtacttctcatcttctatttgttcatttcactgctggaaggtgacctcttttcccctaatcttctttcaacccagagagtttaagtcttctc

SEQ ID NO: 30 - DNA, 431 bp, Homo sapiens
  Genbank Accession No. AA053424
  unsure (1)..(431): n = a or c or g or t
tttgagctttcagatttgcttttattggtagggaaattccagagtggggagccacccaggaggagacaggggtgccgaggcttctgggagtctggaagctcccggatggagaggcttacagccccagccttccccagcaggagcacaggcaggggactggccaagtctgtcagctcagagcaggaccggcttcagggcctgacttcggtctcctcttgacccgccccggaggcttgtggtgggctctgtgtttgcagctctcctgaacagagctagatgagggtgggaggcccccgttggctcacacagtggatgctaccatctccggcctcttggatgtggagctctgtgccagagtcaacagtctccagggtgggccggaagttgttgtaggcgntctcaaggccgaaatctgctcttcctcagattct

SEQ ID NO: 31 - DNA, 451 bp, Homo sapiens
  Genbank Accession No. AA055163
tttttcaaaatatgagtttaatgacagaattagttagctagtattccacaaaaagtattgctctattttcaaaaaatttgcacagtgtcttacacatgtgctaaaagattgagaaaataaattagaaaattatactgcacacttaacactaaatctaccaagcacaatgtaacttttagacagctcagaaggcactttgggatttttttttttttcagtgcctcagggatcagtatgaactccaattattgttgccctggccaattgtgggagtactgataactggagagttaattgactgctggataaagcaatctttaatctaaatggggaaggctcactagcagctacagaggaagggggtattcagatcccagcttaaggctaggaagccagctgacccaatcagagacatgaacccatcagaaaaatgtaaaagttttcatctttc

SEQ ID NO: 32 - DNA, 354 bp, Homo sapiens
  Genbank Accession No. AA055768
tttttttttttctgttcaaaaaaggttttatccaaaaaagttaatcaagacaagcaacagatactgcaaagcattatatacagcaccatagtccaggggccaaagaaatcaggaggggctgggcagtagaggaattccatatattaatgaatgtgagattaagtatagagtgaagacattaacacacaatttctaatttctgttaggcagaatgctcccctaccctgatgccacagcctttcacgtttcctaaaccctagtaacctctgatctccatctgcctcatcaacacgtcaccaccctttgctcttcttccaatttagtcacatgttgggctgaatttatttccactcc

SEQ ID NO: 33 - DNA, 610 bp, Homo sapiens
  Genbank Accession No. AA056121
  unsure (1)..(610): n = a or c or g or t
ctccccctccctgctccaagccggagggttcctgaggtgacagcgcctgcaactgaaatttcagcagcgggagaagatggacaagagaaagctcgggcgacggccatcttcatccgataagaaagatgttaaatgcaaaaccagaggatgtccatgttcaatcaccactgtccaaattcagaagctcagaacgctggactctccctttgcagtgggaaagaagcctaaggaataaagtcatctctctagaccataaaaataaaaaacatatccgagggtgtcctgttacttccaagtcatcaccagaaaggcaactcaaagttatgttgacgaatgtcctatggacggatttaggacgaaaattcagaaagaccctacctagaaacgatgctaatttatgtgatgccaacaaggtgcaatcagactcattgccttcgacatctgttgacagcctagagacatgtcaaaaattagaacctcttcgccaaagccttaatttatctgaaaggatnccagagttatattgacgaatgtctgggaacgggttaggaagaaatcctaaggncccacctgtactgagggaattggtgttcagcaantgcatcaggga

SEQ ID NO: 34 - DNA, 404 bp, Homo sapiens
  Genbank Accession No. AA057195
  unsure (1)..(404): n = a or c or g or t
agaaaaaccaagtgtctttattcctcgatcgtttagtatggcggtgggcggcgcgcgcgggggagcctggagcccagggaatcgacctggagggccagtngngggancggagggtgcgaggntcggctcctccgcagccggccctggaggggttcttgggggatcgcgccaggccaaaagtctgcatgggcggccccgagcctccctgagccggcgcgccccgggnttngggagaggccnctctgnncgcggtgccgntgcgggcccgggtgcggcgctcgcccaagggctaaggtgccccgtctcaggcgagaccccaggagcccgccgcccccgctgtctcttcagccgacgtagacacgtngggccgggaaccccagtcttaacgcgtgttcaagctctgg

SEQ ID NO: 35 - DNA, 491 bp, Homo sapiens
  Genbank Accession No. AA057829
  unsure (1)..(491): n = a or c or g or t
cacggccagcctctcctgcagctgcgcgtngctcacctcgctctggcccctggtgccgtccacctccagggtggcctcaccgtccctcagcgagacggtgaccacgtgctcttggccgtcgcagacttgatctccattagggccaaggcgtatgctccacggccaggaccaccagctgcttcttgagtttcttcgtggagtgatagtctaccagtgccacagagagaggcacggcacggaggtcgggggcccagangcgcaaacaagcacgcctgtgtctgcggctgggcggattgtgaagccacgacttctacttcccaggttgattcagtcccgacgtccagaaggggtccgcatgtagtccaggctgtagaaggcgaagcttnccccggggttagaaagaagcctctctccgtcaccgagaagcactgcatcctcgtgttnatttcaccgttttcctggatggtggtgtcttctccgttcagccagtt

SEQ ID NO: 36 - DNA, 436 bp, Homo sapiens
  Genbank Accession No. AA070752
  unsure (1)..(436): n = a or c or g or t
acgtgcagttcagtcaatgaaatcctgaggattggataaagtaaacaaactgaaatggatgcatcgtaccatctactgatgaggaagatatgaggtcctagttgtgaatcatgaaatatttagagtctgggtacccatgagttagaagaggatttgctgaggtcatttaggtcttcattctgctgtgatgtccagttgagctactgacggtcctctggctgcttctggaaactgatgctggcataggcgcttaaatcctcacttgagcggcgggtggagctgctctcaccgctgcccaggggttgatganngggtgggggtgggggaaggctgcggttcaggggtgcactcctgagggcactgtttgaagtccttgaccaaatccaggtctatgtagttaagaccattctccaaacccccagcagccccacacagt

SEQ ID NO: 37 - DNA, 567 bp, Homo sapiens
  Genbank Accession No. AA082546
  unsure (1)..(558): n = a or c or g or t
agagaagaccgtggatcacctggggacagaggtgaaaggcctgctgggctgctggaggagctggcctggaacctgcccccgggacccttcagccccgctcccgaccttctcggagatggcttctgagccctggagctggagcccagcagttggaggtggtgcacctgccaggcagcgccacagaaccagccctgtcctctcgacttccttccttagcttcatgtgaaataaaagctattctggtctcctctgtgtctgctgacagagtaacccgtttaactacagcctcctctcactccacttccatgcctggaggaagcctgcaaccccctccaggctcagacctggggacacccccantcctgtcatttataggggaagatggagcaggggttgattcacacagatggggggccctctgaattggcctgcttctcagaatgttggccataggtnaaaagcaaggggatcggggttcaggaccancagaatgtttagtgaatctgnatgaatgagaccccaggatttatgtgtccattaagtggttgttgtgntttaaaaaaaaaa

SEQ ID NO: 38 - DNA, 328 bp, Homo sapiens
  Genbank Accession No. AA084138
ggttacaagattctttattttgtaaactatacataaacagtaaaaaagaaaatgcattatactttattacgtaaagtcaacattaaattttgtattgagtgtgtataaattaaatggaaataattaatcaattttgctttcaatgaattgtatactgggaaaccagtttacccactgttgaaattaaagataccaatacgtaacattcaacaggtttttccatttttattatgggcacaaaaccattggtatgatatagttaaaagtgatggtgtgccaaaatgtctacacaattaattaacatgctaacttaaatacagcggttaaa

SEQ ID NO: 39 - DNA, 370 bp, Homo sapiens
  Genbank Accession No. AA085943
  unsure (1)..(370): n = a or c or g or t
agaacccagcggtgttctgaggggagcgtttatttcaagcnaccgatgggacaaacantcccaggcttcccaggtgncantgnccggggcggcatcctcacttccagcggcctccaacgcggcccttccctgcccccttccggaacttctgggcgtggctgatgcggttgtacagcacgttgatctcatatttctgctgtttcagcttcgccatcaggtcgaacttctcagactccagctggtggatccagtccgacagctcctgggctttctcccggagctgttcctcccccatgtaagtcaatgttcaagagggcttcttaacgctcggaaaaggaatgcgcaccttcatctcccggcccccgtctgg

SEQ ID NO: 40 - DNA, 406 bp, Homo sapiens
  Genbank Accession No. AA086264
  unsure (1)..(406): n = a or c or g or t
tttttttttttttttttttttttttttttttttttttttttttttcccanggaaacacttttatttcnggaagtcagaagaaaaacaangngcacaacctgaatgacacagagcggcagntggaaaccacaggggctgccganagctggcctttcacagcagaccactgttttccagtgagaatggtgggccattccaaaacaaagctaaagggttccaaacatccagaatggaagctgcttcccccaactccattacctatactacaggatggattgctttttgtgagaccccttcttccactgggcaattttnggcattatttaccctccccccgatttttaaaagctaaaatggcgtcccagggaagaagtgccggcttggatgcangcttgggccantcact

SEQ ID NO: 41 - DNA, 250 bp, Homo sapiens
  Genbank Accession No. AA091278
gtttgccttctaattgatcatttagactattctggctaagtctgcccacatgtaattaccggctaattcaagcgaggaaaaatgtaagtcatttagaccaaagccaagcagtttctttgcgtgggttactcaagggcttgtggttacttgtatctcctctatgtgaacttgactttgaaagacagagctctagtgtgccagcctgctaagtcctgtaagaatagggagggcggagggggtggcagtacta

SEQ ID NO: 42 - DNA, 307 bp, Homo sapiens
  Genbank Accession No. AA092716
gcgagtctggaactctttcttcggggccccggggcacaccatggaggtctcctgttgaatggcccttgttgccctagagtgggacccagccctcacctcccccagagctaacctgggaggtgctgaaggggcattgggccaccgtaagcaagggaaaaagggcagatcatgcggggagatgaccttgatctttgattgctaccctaaccttgacctttaacccgtgattcccccagctcctggagagatgtctaatatctcttagggaccagaccctaaattctctctccccatttgatgttagtgg

SEQ ID NO: 43 - DNA, 309 bp, Homo sapiens
  Genbank Accession No. AA093923
gtcataatggaccagtcatgtgatttcagtatatacaactccaccagacccctccaacccatataacaccccacccctgttcgcttcctgtatggtgatatcatatgtaacatttactcctgtttctgctgattgtttttttaatgtttgggtttgtttttgacatcagctgtaatcattcctgtgctgtgtttttgattaccctggtaggtattagactgcactttttaaaaaaggttctgcatcgtggagcatttgaccacagtggacgcgtggctatgcaggtgattcctcagtcttccttggtct

SEQ ID NO: 44 - DNA, 271 bp, Homo sapiens
  Genbank Accession No. AA094800
gcgactgcagaaaaagttccagaaacaatttggggttaggcagaaatgggatcagaaatcacagaaaccccgagactcttcagttgaagttcgtagtgattgggaagtgaaagaggaaatggattttcctcagttgatgaagatgcgctacttggaagtatcagagccacaggacattgagtgttgttgggccctagaatactacgacaaagcctttgaccgcatcaccacgaggagtagaggccactgcggcatcaagcgcatcttcaca

SEQ ID NO: 45 - DNA, 323 bp, Homo sapiens
  Genbank Accession No. AA099820
  unsure (1)..(323): n = a or c or g or t
gtgacatgttttttgctttattgaaattctctcttacaaaaggtctgangtattttaggccaggcctaatttgctttggtccctgaaatgcaggcccatggtcatttccatgtcctctgaagtaggtatgtaaactagtagacttccatttttaaggttcacacactttttaacattgtttttatttgatgtaaaacaagacttatgttgtccctaatggaaagaccaagtaagagagttatgtgcgtcttcatggaagggataactggattctttgccagaaccgggttgggaatttagtttgttcaatgtggcatctttca

SEQ ID NO: 46 - DNA, 431 bp, Homo sapiens
  Genbank Accession No. AA101767
catttcataaataatgtactttattttattgcatatggctattaaggagggcatccatgatcaatacagactaaatacaatgcactattctagtccagtttattctcgtctccagcagcatcacattgacccctatatacagcgtgtacagtggaagacagagcaagataagttaagtctcttgtcatatcacaatagcaagaaatatatttaacatcttgatatccagaaacaatacgtacccaaaaagaaaacactgtttaataactgttaaagtttatatagcaaaaaatattttaaatttaaggtaagtcaggcaaaatgtacaaagacccaatatacattgtgaagttttagcaaacataacatttatacattttggttccattctgtaaactaaattaaaaatggtaaatattgcatatgccttt

SEQ ID NO: 47 - DNA, 260 bp, Homo sapiens
  Genbank Accession No. AA102489
agtctacaagttcagacccacatgtaacggatttttgcttcatggttgtcagaggctagtgtgcattatttctgaggattatatccaatgacacgacgcagaaaacacaaatggacggacagacggatggacataatcattaagacaagagactctaaaacgtgccttagtgtccacgtgattgatctaaggcggggacccttctaaggtggggacccgagtgatctaaagcagggtggcttccagcacaagggtgccga

SEQ ID NO: 48 - DNA, 365 bp, Homo sapiens
  Genbank Accession No. AA121142
  unsure (1)..(365): n = a or c or g or t
ttttttttttttttcaacaaactcagcttgactttattacatggaagcttgcagggagccagcggggaaggcctgtctgggcaggaactccatggctgggctggactggactgagcagttggtgttccagatctgccggggagaccagatcaacagcctgcctcttcagtttatatccggaagactcgcccaggtcctggctacttggggccaaggtaggaaacagcctttcctgttttgttgagggttgccancagggtgtctgagctgtgcccaaagtcgatgcagaccttctttttgggcaaggtcaatgttgaactccantcctcccaagcttgtttgaaggactctggaaaacgggtttt

SEQ ID NO: 49 - DNA, 261 bp, Homo sapiens
  Genbank Accession No. AA127946
  unsure (1)..(261): n = a or c or g or t
ttaaagtgaaagaaactttattttgagtaatatacatatcattcattccatttaattttcatagctatgcnctatgaaaattaaatggaatgagtaatatacatatcattcattccatttaattttcatagtgcatagctatgtgtagaagtacacagggaagaataaacattagaaatacctagccatgaaaatatacaagtgaagacatttgatatatccatggacnggcttggaagtattataaaacaggatccatta

SEQ ID NO: 50 - DNA, 444 bp, Homo sapiens
  Genbank Accession No. AA130349
  unsure (1)..(444): n = a or c or g or t
tacaaaaaacaattgttatttgtgtacttttaaaacctcacagtaatattttcacactaccttcttggctgaaagttcacactcggaattccagagcagtccatggccaggcccactggntccccttgctctctccttggctttggtaaccactggccccagggactcagcctgctttcctatccatcccctcagtagctgtcaccatgcaggttaccccttctgtttcttctaccactaactccatgtctgactgcaagtgaaaggaacagaagcccaaacctttgggttttaaggagtttattgctaatctgtaaaacagaaagagacaggagataagcatgacaaaatatagggaagaaatgacttttgcctaaacttccaaactgtgtacaattgaagcctccgctttatagctcttagcacacctctcaaataagaagg

SEQ ID NO: 51 - DNA, 616 bp, Homo sapiens
  Genbank Accession No. AA131322
  unsure (1)..(616): n = a or c or g or t
gatttccatgcactttaatgaggtccagcactcaggaggattagcgcccaccaccagctgcctgggcaggggagggccggagcaggtngcaggcgtcaggcttaggacagggaagggggctcaggatggggaagggtcctcaggacaggggaaggggctcagaagagagcagggggcttaggacaggaaggggcactcaggacggggcagggaaggtgtggggggcagtcgccacctgggtaggaagcagtggtgttttggacaggaggggctggctctccagtgacccaggtggacaccccaggcctgactcacggctttttggggacatagtggtggatccagtccaagtagtaggtgacacgggtgtagatgccaggccggttgggctgggcacagctncgntcccagctgaccacgcccgcctgtagccaggtgccattcaccttgcacaccaggggccctccagagttcgccctggcatgagtccctccggtgttcccggcacacagcatgtcgttcacggatgatgccgacgtcgtctcccgtgtaggcgccaaagtggtatttgcgtcacaaatgtggtttccattatggggaccttcactgcttcagg

SEQ ID NO: 52 - DNA, 464 bp, Homo sapiens
  Genbank Accession No. AA131919
  unsure (1)..(464): n = a or c or g or t
tttttttttttcctgagtaattttttattttgtgcagagacaggatccagaactcctgggctcaagtgatcctcccactttggtctcccaatgtgctagaattacagccctgagccacggccccatgccccgtttttaccagtgtatattttctactggaaaatgagacttttagggatgaatgtggacttgtctgttgaaacttgtaaatttgcttaaaaaaaaaaagatctccaagtcttcacaaaattttatattccccaaggctgccccatcacaatgcctgtgaagcttgactggcagacactgaggcctgaagctgggggctgcagggggtcactggctcacccggtccccccgtaatctgtaaaacatactgggtgagggaggctgctggaggacctgaatctctcccttctccaggcagtagtgaggcatatgctgntggccttgggccaattaaa

SEQ ID NO: 53 - DNA, 393 bp, Homo sapiens
  Genbank Accession No. AA133756
ctccatttattttattttatttttttataaaaaagcaggcataaaatacaattacattactacgaagatgcaacaaaattttaaaaaagaaaaaggggtgcaatttttttcagagaggacagctgatcaaatatttataattttctaaaccatgcagttcattacttattacaattccaaacaaaactcattattatggggatgggagtcagggagaggcccccccccaagcatgatatccagcgctgtcacacagtgcttatgttcaaagtgcttacaaatggtgtcttcacagcatagggaagctgaagccttattccagggaaggagaggtgagtcagtagcagtgtccaatggcagactcagaaagctcggcagtgacttgctcaaaat

SEQ ID NO: 54 - DNA, 398 bp, Homo sapiens
  Genbank Accession No. AA135870
aaaatttaaaataaaattttattttatcttatactcaagttcagacaatagcatgtggtgtacattcaaaatttttgacaggtacagagcacattaaaaaatgaagacatgatcaaggagatgtaagagacaaatagacaacaacattctccctgaatctggaaaaaagcaagcaataagatcacgaaaggcagctgtaaaacaggattattctgcatgtgttgcccacaactagggcaaggttatctctcatcacaagtacaaagccattgatgttagtgtgtaacagagagaaaacagaggatttgtacagctgaggaaataaatggcagatgttacacaggaagcaatataacatggtcattaagtaactgtattcaaccctcaaatttaatttt

SEQ ID NO: 55 - DNA, 390 bp, Homo sapiens
  Genbank Accession No. AA135929
  unsure (1)..(390): n = a or c or g or t
aaagatatcaattatatatgtatataaaaaaaaaacctcactttccccacaaaaagcacaatactgttatcacaaaaaaaatcatcatcctcataattaatcatcctagccacgcaggtgtntttgctgccaaaagatgggacgacaaataacgttgaccaggcagaacccctagacaccctcggcccacccacagcctctccggctgccgaagacgagggacgagggcaaggcagagttctctgaggtccccaggccttcaccccatctgtcagtctgtgtcttctaggacagaaggtagttgtttttttttcttttaaaacgtctgttcaaaataaaaaacaaaagcacacgcgcaagagaagcggggaggaacggaggctgcctgcg

SEQ ID NO: 56 - DNA, 511 bp, Homo sapiens
  Genbank Accession No. AA142858
ttttttttttttttttttcaaggggaaactggggcagttttattgacgatggcaatgtacaagactccacacctaggtatgtgcacgaggtaaggcctgagctcaggccttatgatcctcctcaggacccttgggggcaaacttctcctgcagtttcttccacatgcctttatctatttccttaagctcttccaaggtgtctgtggacaggatcagcttgtactcttccaacgacaggccactgaagctggtgtctctggggcgagggtacttgtgtttgtagtagtttgaatggagtcgcgctaagtctcgtacatctgatcacaggcctcaggtctgcaacctgggtattctctccctcccgaaaggcctgtgctacccgctgtcgcaggtaagcgcccaagtcccggccccgtttggtctcgtccactggccattcctcacagagcttaagaaaacgccggtaccgtgggccgccatttgggccccgcgtgttcccgcccctcgtgcc

SEQ ID NO: 57 - DNA, 341 bp, Homo sapiens
  Genbank Accession No. AA147224
  unsure (1)..(341): n = a or c or g or t
aatacattttcacagtgtgctgaatgtctttatttacaagatatcattctatagtgaatatgaacaaaacgaatgtgcatggttgaaataactgcttgattaaaaatgtgctgtgaagatgaatcactaatctttctaatgcactctgataacacaataaacatggaaaaatactaatcccctaatagatcnaaatatagnatatagnccccnaaatatttcngggggatggattttccttcngaggtttcncaaaaaggnaaaanggaaatggnttcccccagccaatggtttagccaaatattgggggaaatgcccattccaatgggaaaaacccggat

SEQ ID NO: 58 - DNA, 561 bp, Homo sapiens
  Genbank Accession No. AA149579
  unsure (1)..(561): n = a or c or g or t
atagtaaatatattacatttattctaaaacttcaaaattattctgtttttgtagtactgaaaaaaagacagtgccatttgaaacaacagatgcatcttttatacattttcacaagtttgtttttcatatttttaaaggccccatttatctgtaacagtggtatttttatttagagtatcggctacttaatatatacatgcaacaatatatgctttaatagtcatttaacttttaggaatatttcatcacattaagtggttaagcatagtgttaaaagagtggaatttaaggaataagaaaatattgaaaatacgctgttattttcatttgttcactataatagaatgtttttgcccataaaagttatcattgcccaactgaattcctaccaagaactaacaagtgattctcagtggggagaantttntttnntnngaatatagagggctcgttagaaagtgcagatntaggcgggcgcgtantcacaccgtaatccagcacttggaggccaggcgggcggtcacgangtaggagatcgagaccatccggctacacggtgaa

SEQ ID NO: 59 - DNA, 420 bp, Homo sapiens
  Genbank Accession No. AA150920
  unsure (1)..(420): n = a or c or g or t
agcgttgtaaggtttatttgggtagggaaggggacaagtgaggtaactgatccttgctttgtagacagtgcaagacaattatttgtggtgaagggactgtatgccaacaaacgttactcatgctttagttaaaactttaagtcacctaaaacagaaacaattctnaagaacactggtggaaaatagaagtgtaaatgtttcagacaaaaccaaggcattgtcagcacgatgtacattatacggcagatannacagccacatcctaggccacagagcagatcccaagagccccaggcatgcaggagagttttaaaggaacagacggaaattttaactgtgaaaaccacgaaatttcatgacttttggtcagctacnaccccaactaatatatgaccattaagagtaaaattctgaccttta

SEQ ID NO: 60 - DNA, 426 bp, Homo sapiens
  Genbank Accession No. AA151210
  unsure (1)..(426): n = a or c or g or t
tttttttttttttctggatgaatacatgttctggtcttgttacaggttctggtaaatcagatggagaaatgttgttgcagaaatgtcagcaaactttacagcagtagttcacacatgcagctactatacattcattcattgctattttcctaagaaatggagcaacctaggagcttatgctacagtagattccaatgaaccataatgactacttcaagaacaaagaagcacatncaaaggtgtgatatcttcctgttggtttgagttttcaaacctgaaattctttaaaatacatttctgggattttatttaaatattgatgcnacacacctaaaaagcagtgacttcttgggtaaaatgtaatactgaaatggaaaattgtcttttcaaaaaaataagaagtgtggtttggaaattccccgtgcc

SEQ ID NO: 61 - DNA, 400 bp, Homo sapiens
  Genbank Accession No. AA151428
  unsure (1)..(400): n = a or c or g or t
cagagagaaagtgctttatcagccgggctcagcccgcacacggactcgccaggagtaggtggtcagcacgcgctgctggcggcnaccacgcaggtgtaggtgccctcattgacggcgttggcgatgatgctcaggtgcgcctcgcccagggccaggtagccggggtaggagaactccaggggctcctggtccttgtaccagtacactttccctttcttgtggaggatcttctggccgcagcggaaggtcacgttcctgccctcggnaccaagcctggttttggtcctggggggcggtggnggtggttggccaccgtggggaaaggggaatttcgtagcaagaaantccgcaagctngcttgggggcaaaaagcttcctttccantgaagncccgccggga

SEQ ID NO: 62 - DNA, 502 bp, Homo sapiens
  Genbank Accession No. AA151544
  unsure (1)..(502): n = a or c or g or t
caggacgagctgtgggggctgcaccggctctacggatgcctcgacaggctgttcgtgtgcgcgtcctgggcnggaggggcttctgcgacgctcgccggcggtcnatgaagaggctctgcccagcagctgcgacttctgctacgaattccccttccccacggtggccaccaacccaccgncccccaaggaccaaaaccaggctggtgccgaggnaggaacgtgaccttccgctgcggccagaagatcctccacaagaaagggaaagtgtactggtacaaggaccaaggaagcccctggaagttctcctaccccggctacctggcccttggncgaaggcgcaccttgaagcatcatcgccaacgccgtcaatgagggcacctacacctgcgtggttgcgccgccagcagcngttgctgaccacctactccttggcgagttccgtgtgcggggctgagcggcttgaataaagcaatttctctctgaaaaaaaaaaaaaaaaaaag

SEQ ID NO: 63 - DNA, 285 bp, Homo sapiens
  Genbank Accession No. AA152200
  unsure (1)..(285): n = a or c or g or t
tactcttccctcctcatttattttggaatgtgctagaaacagcttgaaacatccctttaatagcttcccggcctcacgagtgttgaatgacatgacgaattctccttcatagaaggtacaggtgaaccagaactggaggggcatttgggatccttccttcttcagaaagtgcgatcgcatcaagatgcatgtggttttcagtagaactggcccatgtttcttgggagcgaggtgtccaaaccactgttcatccatatttccnggatgatttgctcccngggctca

SEQ ID NO: 64 - DNA, 457 bp, Homo sapiens
  Genbank Accession No. AA156565
atagtaaatatttaattgtttccatcagcaattccagcacaagttttcctggatggtaggcagaatcaagctacccaagggttcatgatgaggtatgggggtcactgaggagacccccagagtcactgacccctcccgccacctccacacaccaggtggccctgcagaatgagggttgggctgatagaatgtcaattaggggagacaggatacagggtgagggaacagggtctagcttgtatatttgcctgcaggaaggagggagggcaggagagactctgcatagaaggactggaactacacatttaagttttcaaccccaatatgcagggggaaacagccaagccactctccatctgtctagtattaggaacctctcttcaagtggtcttttgtcatctctgttcttcttcccaattctgtattccagattccaaattctacaattgaaacccaa

SEQ ID NO: 65 - DNA, 428 bp, Homo sapiens
  Genbank Accession No. AA156897
cagacatggaaatataattttaaaaaatttctctccaacctccttcaaattcagtcaccactgttatattaccttctccaggaaccctccagtggggaaggctgcgatattagatttccttgtatgcaaagtttttgttgaaagctgtgctcagaggaggtgagaggagaggaaggagaaaactgcatcataactttacagaattgaatctagagtcttccccgaaaagcccagaaacttctctgcagtatctggcttgtccatctggtctaaggtggctgcttcttccccagccatgagtcagtttgtgcccatgaataatacacgacctgttatttccatgactgctttactgtatttttaaggtcaatatactgtacatttgataataaaataatattctcccaaaaaaaaaaaaaaaaaaaaag

SEQ ID NO: 66 - DNA, 602 bp, Homo sapiens
  Genbank Accession No. AA158262
  unsure (1)..(602): n = a or c or g or t
ggtcgagctcaggttctgcttgccgggtgcccagtgaagccgacagagcctcgagtgcttgatcactcattgtatccttctccacctttcttttcttctcttggggtggagcagcacttctgactgtccctgctgactgagcttttaaaacttctgtagattcctctttttcagttttctttccagcagctgtaggcgacccacaggtgaagtcagatgacaaggcgtctatagcatcatctggccctatgggtttagccaatagttccctatattttggaggaattgtgacttctcttttacccaattcctctatgtaggtggaactcattggatctgaaacttctggtccagtatacgttgtattttcttcttcagtttcttcaggtcctcctaaagtatctattaagtcatccaaagcagcatccatgcctgactttcccgatggtttatccggtttagattcaactggcacagctggggttaatgatttcttttcttttttcttgtcanccggcttgcagatattgcagtgataccagcaacantctctccaccagcagaaatcatgtcttgtgggttagtctttgggtcnggtgatt

SEQ ID NO: 67 - DNA, 392 bp, Homo sapiens
  Genbank Accession No. AA159025
ttgatgtctagaaacatcttttatttgggtaacaggtcccaaaacaggtcagttaataaaatagattctaaagaatatgtccctatgcacagccctccctccccaaaaataacgctgggggtaggcattgcctttcccccttgggctcctcgggtgtatttaaaaaaatgttttggcagctcagtgtttatcatctgggcatgggacaccatgtccatgtccccatattcctagggtacagcagcagtagatggctgcaacaaccttcctcctaccccagcccagaaaatatttctgccccaccccaggatccgggaccaaaataaagagcaagcaggcccccttcactgaggtgctgggtagggctcagtgccacattactgtgctttgag

SEQ ID NO: 68 - DNA, 476 bp, Homo sapiens
  Genbank Accession No. AA165312
  unsure (1)..(476): n = a or c or g or t
tcgtnncntcggttctgagaaataggcactggcaatttacacatgccttgctgtgtaatctcactatatttgctcaggcaaagtgggagaagcagccttaggttttcattctagagatgccggctttcccacctgatcggcttagagttcacgattgactgttttgggcttcatttcaccctctacataacaagcgggtggactagatgccttagcaagggtccgtgttgtgtggtgtctccagccacgcactcagctcaatcttagcacagttaaaaaatgcctttctagcaagttatctgcccagtgcctgaaaaagtatcatttcttgtgttcaataaaaaagcctcctaatttaatcaaggacctatggagataactgtcttttagttgtggcattgcaaggatacaaatgcagagatattttaaaagtgatccttctgtaagagtgaacccacgatatgatctggnagcaa

SEQ ID NO: 69 - DNA, 479 bp, Homo sapiens
  Genbank Accession No. AA165313
  unsure (1)..(479): n = a or c or g or t
cacaagcccccacgtccatagccaagttttccccggtttcccagcagccagtgacttctgtagcattaggattcttatagtagttattgtctacatttctcagcagattgaatatgtactgcctcttactactggactgtttattcttaaatgtgtacagtatggatttatgtcgtctatatattatgcatttatttgtcttcttcgttgtgatggtaagctcctggagggcaagtcttgcatccactgctttgctggcaacccgactggtaagcttctggaaggcaaggcttgcatccagtgctttgctggcaacccgattgctaagtaccgtgttttaagcttagttcagtctcaagtgtttgcagccacatctgaagaccaataaagcaactgctgggtttatcccntgggagctgacagaatttcctctcccaaataccatanacaggaaaatcataagcctgaattacccggtg

SEQ ID NO: 70 - DNA, 298 bp, Homo sapiens
  Genbank Accession No. AA171939
  unsure (1)..(298): n = a or c or g or t
ttttttgaggcacctgtgggactttattaggtaaacagaccccagctccagccacaggttggaccggccagctgacagtgcggcctcagacacccccgccaggttccctcctccctcctctctcagggtcaccagtgtgtgaaagatcggggcatgccggccacagggggaagcagggttcaggctgccccacctgggtctggccctggcaggcgccccctcacctggctctgctgtggganccgagaacaaagacatnacctgcctggctcctgctgccccggggggtcagcnagca

SEQ ID NO: 71 - DNA, 596 bp, Homo sapiens
  Genbank Accession No. AA173223
  unsure (1)..(596): n = a or c or g or t
ttttttttttttcagccaaattcatatttattccagtctctaacactctgttgttatgtctgctgtaagatgatcaggagttagtatgaagtattcttctctacgcaccaaagaaaacaaacaaagcaaacttcaagtcagtgaattagttaccacagttaaaatgcatttgattttgtccttttcctttttcacaagaacgacagctgaatactctttcatgtgatgcctgatatttttctttttctttttctctcttttttgagacagggtctttaagatggggtctcgctctgttgcccaggttggagtgcagtggtgcaatcttggctcattgcaacctcagcctcctgttttcaagtgattcttctgactcagcctcccaggtagctgggattacaggcatgtgcaccgtgcccggctaatttttgtatttttagtagagatgggggnttcaccatgttggccaggatggtctcgaactcctgacctgaagtgatccacccgcctcggcctcccaaaagtgctggggattaccggtgtgagccactgtgccagctctgatggtgaaaatttcnggtacaggcctagcccan

SEQ ID NO: 72 - DNA, 408 bp, Homo sapiens
  Genbank Accession No. AA180314
ttagcaaaaacagcttttttattgtggtagtttgtggtatgtgctcctggatcatgcagaaaaaaggctgggcctcagttagctccgggagccattcttaggaccctccggctgcacacagagaggggctgggtagctggctgggctggggcacgcattcactgggctggcacaggctgaggggtctctcgcccactatcattaggcccctccagcccgttatgctcagcccccggctcaggatgctccagggcgtgccgggtatcagcctgccagagctgcaccaggtccgtcggggtctttcctgccaggttcttggtcatcatgtcagccccatgcaggagcagcagtttgatgattttgtagcggttgagcctcacagcgtcatgcagggcagtatccctcgtg

SEQ ID NO: 73 - DNA, 479 bp, Homo sapiens
  Genbank Accession No. AA182030
  unsure (1)..(479): n = a or c or g or t
atcatcataaaaaatatttattataaaaaattatcacatttctctgtacatagcataaagacaaaaacacaatgtatacattaataaattaagtgggcctgagtattcagtatccatctactagaatcctaaagctcttccccagatttcacaaaggccaatgtagattatttctattttatcaaagttcatttgcacagttggtgtaattgagatactaacatttcttttttctagtgttttaaagatagttcacagtatttgagttaattaattaatcaactgatttaaatctttggtaaatacaagtatttacatgtaaaaatgtttagctcaaatttcagtaaaaaactggaaatgaccaataacctactgccaactgttttggtataatccagaaatgcatgagccggactcccaccattaagaaatggcactgtcnaggacctcngatgataaaactggaatccncaaaaaat

SEQ ID NO: 74 - DNA, 313 bp, Homo sapiens
  Genbank Accession No. AA182882
  unsure (1)..(313): n = a or c or g or t
ttctggcacatgattgagcatttattgcggcactaacagagggtgctgggggccccaccatccttgcctctgcccttttcacctccccctccctcccagcttcttctgcctagagcgttccagattcccctcacattttcctggatcagggccactcctcccaggcacctcttgccctcaccagtaccttttgtcccttctcctggggctgagggtcctcagctgtgctggnccccaactctccacccttagtgcccactgtctctgccaccctccctttggaactcagggggctcaggcatcctggcctctg

SEQ ID NO: 75 - DNA, 258 bp, Homo sapiens
  Genbank Accession No. AA188981
  unsure (1)..(258): n = a or c or g or t
tttacactttactgagacaattttattcactatggatatatatacatgatcaacattttatcttcattcttcagaagacttaattagagtagctttcttctcatacttatctctaatctctttaatattttccgagagatcttctgacatgcattcntcatattctctatcaactttagcaatctgctcctcaagatgtttctctacagacccaacatgtgtagcaaccatctctaacagacgttgcaagttaatttc

SEQ ID NO: 76 - DNA, 506 bp, Homo sapiens
  Genbank Accession No. AA189083
ttttttttattccaaatgtctttattgaaacagaatgatagagcaagaaataatgaggtctgggtggatgtctttgggcgcaggatggagcccagacccagtggttacagtgtggagctctctccctgtcccctgactctggccaaggaagtgaatgcaaagcagcagggaggaggcagggtggggacggccctctgagctctccgcgatggctggcgtgaggtgcctctgagacttctgggcagccctgccttccctactcagtcttcccgatcttcttgccacctttctgtgtgggccagcctcccgccagtaactcagaggccgctcagagggcagggttgggggtggcaagcagcgggacgtggtcacagcgggtagggggtggctgccgcagcagggaaggccggcgacacagctccccgtcccggagcacctcgggcaggagcttgcgcttggtctccggaagcagcataatgctgaagaatgcagaagagggcgcaagc

SEQ ID NO: 77 - DNA, 513 bp, Homo sapiens
  Genbank Accession No. AA193197
  unsure (1)..(513): n = a or c or g or t
tttttgaatttgactacttttacttacaagagacttttccccatcaaacgatttccccatccatttattacacttctgaagtaggatttctgaagtcatcttatggcatgtaattcttagtataatgcacaggattcctgtcattttgaagcacgaggagaggtttttgatatcttaaacatttttttagtgtagatgcacatattctccacttccaattgtaatagaaaatcagtttaaggataccctaatgatgcaaatgaaatgattagcaaacaactcaaatttaggagccttctttacaatccattgagtgaaacagattcacaaaataatttgttcaactgaagatttaatttattattagaaaatggttttaaactctgatcattacattgaagagtcaatgactgaggttttcttacctactggctcatctcttagacaataacttcttgaataatttcnacatgagtgtctgtacaagcttttaaaaaaccgaataaattaaag

SEQ ID NO: 78 - DNA, 499 bp, Homo sapiens
  Genbank Accession No. AA195678
  unsure (1)..(499): n = a or c or g or t
gaaaatttgcctcctggtaaccctgtaatggatggggcccagaaatgaaatatttgagaaaaacaagtgaaaaggtcaagatacaaatgtgtattaaaaaaaaaaagcctattaatagggtttctgcgcggtgcagggttgtaaacctgcntttatcttttaggattattcctaaatgcatcttctttataaacttgacttgctatctcagcaagataaattatattaaaaaaataagaatcctgcagtgtttaaggaactctttttttgtaaatcacggacacctcaattagcaagaactgaggggagggctttttccattgtttaatgttttgtgatttttagctaaagagagggaacctcatctaagtaacatttgcacatgatacagcaaaaggagttcattgcaatactgtctttggatattgtttcagtactgggtgtttaaaggacaaatagctgctagaattcaggggtaaatgtaagtgttcagaaaacg

SEQ ID NO: 79 - DNA, 463 bp, Homo sapiens
  Genbank Accession No. AA197112
  unsure (1)..(463): n = a or c or g or t
aaagtataaagtgttttggaaaaaaaggaaaaaaatctatataaaaatctcttcacatataaaatcctgaagaaggtgcaaggtgagacccagtgcgaggggcgtgctcagatatgcagtgtgtgtgtgtgtgtgtgtgtgtgtgtatccgtgtgtacatgtgtgcacgtgtgtcgtatgtgtctgtgtgtctgtgtgtgtgtgtgtgtgtgtgtgtgtgtgtgtggtgggtgcaagtgcacgtgtggcccacagagggtggggagaaagcttggctttttacttccatccaggagggaaggagggcggctggtcctccagccttggagggtctgcagctgggcgggacctctactcagccaggctgttgcgcatcgactccttctcctggagggcggccatggcaagacgcaggtgctccttcagctgctcgatctcccgctcagaccgtgtctngatgtga

SEQ ID NO: 80 - DNA, 404 bp, Homo sapiens
  Genbank Accession No. AA205376
aagatttgaattttttttattatcccagcaaacattacactagagaaaatgattgggaaaatacaaataagttcattaaaaacacaggctgattattcatatctattacattcagaattatgcgaaacaattagttatattgcaaagctgtaattctttttctaacaaagcatgattttataaaactttaatgttgccactgattcaattttaatacaaaatacttatatacacaatacaatataaaagtaaactgtgtagtgccttccacaaagggatatattaaggcgctttacaaatataccaatattttgacccaaattactttttgctttagattaaaatgaacaggctaaatgttccactttaaataccaaagggatggtttattaaaaattttttat

SEQ ID NO: 81 - DNA, 523 bp, Homo sapiens
  Genbank Accession No. AA205724
  unsure (1)..(523): n = a or c or g or t
cccattgggtgacagcgtttattgaaaggaaatcttgctttatccaggaattcactcacatggaggtagctgcaaggagaatgtctctttctcatgacaaccaaagcgaccaaaccataccctaaagcagagacgcaatggaataagtcaacgggcattgtagaacgacactcagaagcaggaaaaaccataaaagatacaggatgattgtctcttcagtattgcatttggccatgtatgtgtttttacataaaatatatgttttctttttaagctagctaaagaaaatactcttgatcggggttagttcttaaagcaaaaaacagaagaaaagtatgtatatataatanaattaaagaacgatagcatgttatacctggaaaggaccgtgggcactaatctgcactttgttccaggtaatccatggctctgagagtgagcacactgtcaaagtcactggggtgagatgagccgggacttggaaaaccctctcttaactttcagtctcaactcctcccactcc

SEQ ID NO: 82 - DNA, 587 bp, Homo sapiens
  Genbank Accession No. AA211443
  unsure (1)..(587): n = a or c or g or t
catttagtcaaatatttatttgaactcatacaaagtttagtgacataatttaaaaggtgaagaactaaaacgcattccaaatattgaccaaaatactgtaggaagtagcttgggaaacttttcatcaaaatcgttaggcacattgccatatcattctccataaaatcatatccctcctcaaaaccacaccctccaggtgttgaatttatgggctaatttgttctgtgaggtgccaaaaatgaagataaagtaagaaatacagccaactagaaggaagagatataaatgtacaaacaggccatttctgctagagtctcaggcattcaggaggttcacaatcatcatacaaatatataaaattttagtgagctattgaatccatcttctgcctctttatttcttcacatcaatccttttttcttcctactactggtcagctttggggacatattttaggttcacttttaatattctggatttccgatagattgactgcaggnccgggaggttcctcgctccnggaattggcttcttctcctcatccgaggtgggaggacaccctcctccacttcgggggacattctttt

SEQ ID NO: 83 - DNA, 382 bp, Homo sapiens
  Genbank Accession No. AA214688
gtttgtttggtggggttacacggggttcaacatgcgtatcgaaaagtgttatttctgttcggggcccatctatcctggacacggcatgatgttcgtccgcaacgattgcaaggtgttcagattttgcaaatctaaatgtcataaaaactttaaagagaagcgcaatcctcgcaaagttaggtggaccacagcattccggaaagcagctggtaaagagcttacagtggataattcatttgaatttgaaaaacgtagaaatgaacctatcaaataccagcgagagctatggaataaaactattgatgcgatgaagagagttgaagaaatcaaacagaagcgccaagctaatttataatgaccagtttaggaaaataagagctca

SEQ ID NO: 84 - DNA, 398 bp, Homo sapiens
  Genbank Accession No. AA216589
cacaaatttaagtttggtttatatattttattgacatggttactcaatgtccacatcattccatctgcatcgtcttcctacaaacagtttttcttctactattcggttatttctcctttttttgtttcctatttcagaatcaaatttattttacttgcaaagtcagtggaatatggtttggaaccagtagggcctctaacttaagcccagaacctgtcaaagagaagtgcagtatcattgctaagacttgaacagtttatctctcagaatcttcagttcctttgaatttctcagctcttagtgtaatctgttttatgtgtttgttgtagacttccatttatgggatagatttccaaaataattttgggtaatccaactgggtattttagcattcccgg

SEQ ID NO: 85 - DNA, 378 bp, Homo sapiens
  Genbank Accession No. AA219100
  unsure (1)..(378): n = a or c or g or t
ttttttttttatgcttgaactaatttattgatgagattctcatttctgtagtataaaaggaaaatattttgcagttatctcgtatttgaaagactttgccatagagaactttatcagaaatggatgaacttttcattatttcttataagcatattggttttggcctgcttgagtttaaaactttttttggtagacntagaatgttaatatttagataaagaaaatattttacngaagacattaccagaaagtaaaataacttgaacatttcngtattagcncnttatcagagaataacatttattttatttggaaagttttccnaaatatgagacnatcngcnatttctcagacnaagtgaaaaatttaataaaatag

SEQ ID NO: 86 - DNA, 444 bp, Homo sapiens
  Genbank Accession No. AA219304
  unsure (1)..(444): n = a or c or g or t
gcttgggcaaaagtcttcagaacaaaggctgtgagcaggtgttgccctggttcctgccatatcgctccccaaaggtgctgtaggagccatcatagtgtttgtagttcaactgtctctggtaaccagtgttgagatagccaatggcttggacttgacctctggagtaagctgctgtgtttcatttagataatccagtacatagatgttaggagcaaagaggaccatattctgctctccacagccatagggcatctggagaagattttgtgtgttttgcatggcagagctacatatgtctcccaaaactgagacagaagctcgggcagattcttctaccacatttggtggcagtttcagggataattcttcagaaacctcancacctgntggacnaagtagggagttgaatgttgtttccttctctagtccttcaggttcaaccaa

SEQ ID NO: 87 - DNA, 341 bp, Homo sapiens
  Genbank Accession No. AA219552
  unsure (1)..(341): n = a or c or g or t
tttttcagtcatgattggtttaaaagtttaattggagacnttgccggtggnnaacaaaatganggcatacaactgtcacaggcagggcagtaagtacaaagtctagctgtaaaaaccgtttgaaaatataaactcgtttttggaatacatgtgtcaaaggctgcccatgttaatacctttggtataaaacggtaacgattcccttgacaaacccatccatcacctgacgcacattcacatctcctggtaactactctacctagtctagtctcaaccacccctgtcagtcacgactcactcctgttcctttgcaggtgcagaggagcctgggaggtaggtca

SEQ ID NO: 88 - DNA, 323 bp, Homo sapiens
  Genbank Accession No. AA227926
atgtaaactatcaaatgtttatttaaatttccatttaaaatattttcaagtaaaatatgtacaaaaatggttataaaatggttgaagcaactagaagcgtgacaggtataatacatataaatacaaccaaaattcaattcaatgcaaagttgaatgacatcatattgcaccaaaatttattccatacaaaagcacatgcatcaagagtttccataagatgaaaacaaacacacttacttcatagcatcttaccacttacttacacaaatagcccataaacaccatctggcattgtgattgcagtaccagaactctccccagag

SEQ ID NO: 89 - DNA, 469 bp, Homo sapiens
  Genbank Accession No. AA227936
tttttttttttttaaaaacagaagcgcgaccatttctttattaaattatacaaaagggttggggaggggggcagctgtggggctcggcacaccccgggccccaccccggcctggcgctgtctgagaagaggggatctgagggagatccagggatcaggcaggatagggatggggcaggacatgaggctgggggatgcagaggttaggtgggagaggctaccggagtaagaatgaggctggtaggggagggagaaagagagcaaagagagagaggagcaattgggggccagctggagagctcagatggagcaggtcaggaggtggaacaatggcagagtgagggtggagggcgcagtgtctggagaggcggaaatgagaaggctggggagaaagaagagggtggcagctctggtgcagggcccagagcagggagccaggtgaagagtggctggactttgctgcccccacc

SEQ ID NO: 90 - DNA, 462 bp, Homo sapiens
  Genbank Accession No. AA232266
atttttctactttcttttaatatcattttttaaagttggtaagcagctagacatcatttagaagcagacgggttaaaatagacaagaaatagcaaagacacatccttcacatcgtacagaactgtattagtatccaccaccaccatcacaggggagggctagctgtcactggggtcaggagtactctccattattgtgcaggggaccagacagcatttaggtgtgacgatgtcaaactgagtggacatagagagtgccgggatcaaggtctacagttttggctctagacttgcgtgagggttggttactcttaatctcttccaggctgtgctggatcccatagccgaagtagatagcaaagccaatcagcatccagaccccaaatcgggcccaggtaccagctgtcatctgcatcataaggtaaatattcacagagatgctcattagtgggaggagaggcaa

SEQ ID NO: 91 - DNA, 401 bp, Homo sapiens
  Genbank Accession No. AA232508
gagggtacatcgggggagaggagaggagaggagagcctctctgtgccttggtttcccatttgtgcattcagggcctctgcaggctcacacagggagtctgaggggatagtgtttaagtgagcactcaggcttcctctgaggaaaagaaatgaccaaagtgcagacttttattactgccattcctgctcctaatgggagcaggagtcaaaaggaaaaacaaattaaaaggggctaatgagaaaggaggagagatgagacagagagtgtgaagggctatgcgcgtggcatctcataaattcttattgagaatggcacaggtattaaaaaagtttctgggtagtctacgagaaatgtcaattattatctctactacaactacttacatatatctaatgggaaaa

SEQ ID NO: 92 - DNA, 387 bp, Homo sapiens
  Genbank Accession No. AA233347
gctgcaaacatgcagagatttcatttattttgtttggcacatgggaactacattttgttcctattatctgtgtgtttcactttgctgtgcagattttcatccaatttttttcaggggagggcatatacatttgtagggctgtatctatccaattctgcctgtaacaaacacccaaacatcctaaaatatcaattataagacagacaagtgtaatgtaaaactctggagaacatcaaagaaaaatggccatgcatctgctctttaatgttttcctacgatatattaaaataaaaacaaagtttcagtctcttcacaagaagtaatttatattctctgaattttttcagccacaacaactggattctcttttctgatttttgctgcagc

SEQ ID NO: 93 - DNA, 403 bp, Homo sapiens
  Genbank Accession No. AA234095
attaatgcaaacatatttttattaaagaatgaatgcatttatgctaaagaatagcttacatatgttgtaaagcaacaagcatatcttcaagaagtgagtcctcctcaatatgactccatgcttattctacatgcctgaaaactgggcccacacacaggggcacacgtacacgcacacaaacgcagatacggacacacagatatgcagaccgaaatgctgacaccatcgctctctagattggattagctctcatttaaggcttcttaggtgccgcagtgcccctaatattaccaggattgaaaacagacttttaggaaggagcagcattacttcgaaaagtagtcatctgctcttgtcctccaatgtgtgtattttaacaaataccatttaattctatgttgac

SEQ ID NO: 94 - DNA, 103 bp, Homo sapiens
  Genbank Accession No. AA234634
cagctcacgcgggacctggccggcctcccgagtctcttcaagcagctgcccagcccgcccttcctgccggccgccgggacagcagactgccggtaacgcgcgg

SEQ ID NO: 95 - DNA, 291 bp, Homo sapiens
  Genbank Accession No. AA234996
  unsure (1)..(291): n = a or c or g or t
ttttttgaagcttcacacctttattgtgtccgggggcgtccggggcctcaggggtgttcgtagcccgtggcgagagggttcacgtggctattgtggaacagagtgtggttgccgtccccccaggggtagggcttggtgcggatcggagggtgttggtagggacggaactcggggcgcgggcggtggccagnantggagataggtagttgaaggtgcagagggccacgctgggcagcgcagcatcgaaggtcagcagacgccaggtacgagctcctgctcctccgtggcctt

SEQ ID NO: 96 - DNA, 139 bp, Homo sapiens
  Genbank Accession No. AA235310
tcaacaaatatttattgttcatcaaagacgagccagattttatgggcatttgtgatggaggctggccttagctttaggagaaggaactccaagagcagtagtgatctctgagatcaccttgttcaccctcctcggggca

SEQ ID NO: 97 - DNA, 382 bp, Homo sapiens
  Genbank Accession No. AA235618
acaatttaataatttattacattacagtggcatcacaccagcagtcaataaggccactctagggaaaaatctttcagtatttccatgacacattctgtttacaataattcataaactggtaaaattcattctaagaaaacttggcaaatgaaactttggactggaattggcatttctttctctgcttttcgttcccaccatttctttcttttatactacagtattcatattttaaaatgttttaaattatttcagaacattaagatagcagttacattttttaatagttatattattttaaaatgactctttaaaataaagttttagagaaactatattatggatagggctgatttacattttcaaattttctaaaatcagc

SEQ ID NO: 98 - DNA, 175 bp, Homo sapiens
  Genbank Accession No. AA236241
ttttttttttttttttttcggcggtcaacgcgctttattccgaggggcttcagatacagatgaccccagccctgcatccgcccggaagcgtccccttactcccatggggcacctcgataccagctgccctgccctgactcacttctcagcacccatcttacggcagtcggccctg

SEQ ID NO: 99 - DNA, 401 bp, Homo sapiens
  Genbank Accession No. AA236455
tttttacgaaaccaggtttattaaaatttctctacaagtcagaaacggccatctcactgttcacatatatacacgtatgtacaggaagaacctagtgtttctagctttcccggcagaaggccctgccagcccagagtccttagtcggataatgtatcacagatacaacagtcgagcaaccacgagagcgttagtgcgacagaggcctctgtcctccctcttctcaaagtcccatgattctgtcaaggtaatattgccaataatcattcacatttcacgtggttttagacacgcaggttattcagacagacacagacaacaaaacaagcctcaaagccagaacaaaacaaaacaaaaccaaatcgaacataggtataaaaggtaaaatatatgtacaaagta

SEQ ID NO: 100 - DNA, 533 bp, Homo sapiens
  Genbank Accession No. AA236476
  unsure (1)..(533): n = a or c or g or t
ttttttttttttttctcatcactgagtatttattatatataacaaatacatgggaaagaaaaaactatattgtgtgatataaatagtttatttacattacagaaaaaacatcaagacaatgtatactatttcaaatatatccatacataatcaaatatagctgtagtacatgttttcattggtgtagattaccacaaatgcaaggcaacatgtgtagatctcttgtcttattcttttgtctataatactgtattgtgtagtccaagctctcggtagtccagccactgtgaaacatgctccctttagattaacctcgtggacgctcttgttgtattgtctgaactgtagtgccctgtattttgcttctgtctgtgaattctgttgcttctggggcatttccttgtgatgcagaggaccaccacacagatgacagcaatctgaattgttccaatcacagctgcgattaagacatactgaaatcgtacaggaccgggaacaacgtatagancactgtagtcctttttttcacagtg

SEQ ID NO: 101 - DNA, 308 bp, Homo sapiens
  Genbank Accession No. AA236545
tttttttttttaacgttttcaaaatctatttttatttttcttcagtattacctgctgttcccaagtggctgggtaatctatgggttatattttcatttaccctcaaagctaggctgccagtggaagctaagaataacacaattaaattcaagtttctctagaaaatatgacaaatcaaattttaagaaagtgtaacttgtggttttgctttggttcaagatggctgatctgagaatatcaaagcatttaattcaaactaatagtgtgtcctcatcctaggactagaaggtaatttttcttttaaggag

SEQ ID NO: 102 - DNA, 297 bp, Homo sapiens
  Genbank Accession No. AA247204
agatacagagataaacgagtacatgattatgatatgagggtggatgatttccttcgtcgcacacaagctgttgtcagtggccggagaagtagaccccgtgaaagagaccgggaacgagagcgagaccgccctagagataacagacgagacagagagcgagatagaggacgtgatagagaaagagaaagagagcgattatgtgatcgagacagagaccgaggggagagaggtcgatatagaagataatgggcttttggaagcactgattgtttaaagatacaaaaaatcttgtatttt

SEQ ID NO: 103 - DNA, 342 bp, Homo sapiens
  Genbank Accession No. AA248555
attcgttgaaggacaccagctgcggaatttgcggctttggcagattgaaatcatggcaggtccagaaagtaatgcgcaataccagttcactggtattaaaaaatatttcaactcttatactctcacaggtagaatgaactgtgtactggccacatatggaagcattgcattgattgtcttatatttcaagttaaggtccaaaaaactccagctgtgaaagcacataatggattttaaactgtctacggttctaacctcatctgtaagttccatgcctggagaagctaatgccacctaatcakgtgataattcaatttgtacaataaattatgacctggaaaa

SEQ ID NO: 104 - DNA, 458 bp, Homo sapiens
  Genbank Accession No. AA250850
ttttttttttttttttattttttttttttttagcaaagaaaaagaacttttatttcttcagtagtttctaatgcagacaaatgtgacaaggcagggagctgagctgaccccaagccgaaggtcccgactcctctcgggagcctggaggagtcccggtagcgaatagatcagatgcctcatcctcgttcaccccaaaaggctgagaccctggtgtgtcctcctcgaggaccctccctgtttctgggtgctagaggccgttgctgtttctgtgacagagggatggctttgggagctccaaagaacctaaccaagtttttttaagaaattcgggggacgaagcaataaccgcttggcccccttgaaagtttcgttcaaacttttttcaactgtaaaaaactggttaatctcaaattgtaaaaaaattttttccccccttattttgaaaaaatgcatttttt

SEQ ID NO: 105 - DNA, 410 bp, Homo sapiens
  Genbank Accession No. AA250958
cagttgcaagatttaatagagtgaaatagagtgaaaacagagctcccatacaaagggaagggacccaaaggcggttgccgttcgctggctcgaatgcctgggtttatattgcaatccttgtccctcccactgtgctcctcaggcaatagatgattggctatttctttacctcctgtttttgcctaattagcattttagtgagctctctgattggttgggtgtgagctaagttgcaagccccgtgtttaaaggtggatgcggtcaccttcccagctaggtttagggattcttaatcggcctaggaaatccagctagtcctgtctctcagtcccctctctcaacaggaaaacccaagtgctgttggtgaggttggctgatgaccactctaactgcttcctgctgaactgggg

SEQ ID NO: 106 - DNA, 372 bp, Homo sapiens
  Genbank Accession No. AA251769
ttttttttttttttttttttttttttttttttgatagccaaaagcaatttattatagtttagcctcaaaaaaataaaaataaaaaaattatccagtggttatgaggagtctaggaaaacctgtcccagtaatgccaacttggaggtgaagggctgactggggcagctgagaagtgggaccttctgtttggcaggcttcctctcccttgcctggtcatggttttctggtgagaagagtgttcctggccttgctggaggttcccatggccccgaactaacagtgtttttctgaaatttcgacctgctccgtttgagagagtagaattccctcatcaagtcctccacctcccactgctcttccttcagcctctgg

SEQ ID NO: 107 - DNA, 389 bp, Homo sapiens
  Genbank Accession No. AA252219
ccagaaatatttattggtcactttctgtgtgctagaaacattttttatacgatgataaatgaacaagactgacaatttcttgcccattaagggttacattctaataagcgataaagacaacaataataccagggagctgagtaatctaatacaaagcaagacaaagccagggtcactggaagcagcagtggtctttctgaggaagttgcagctgatcaccaacctgaatgaagtgatgtaatggaaaatagaagtgtttgaaggaagattgctttagtaactgaggaggagagaggaaagaggagaaactgcacaagtgggtagagatgggaaagtccatggcctatggggaaggtgaggaagttgacttttattttcaatgtgccgtg

SEQ ID NO: 108 - DNA, 281 bp, Homo sapiens
  Genbank Accession No. AA252528
ttatacttatgattagttttattataaaggatacaaatcagctccacaagccaaggaagacacagggaaaggtctggaagggtcttgagcacagtgctcccatgccccctcttcgtggaattagggcacactgccctgccggcatagccacagcttcaccacccaggaagctatgctgagctttagtgtccagagtttttattagggtttcatgatgtactgattaaagcactggccagatgattaaactcagcctccagtcccccgccccataggtcagg

SEQ ID NO: 109 - DNA, 412 bp, Homo sapiens
  Genbank Accession No. AA252802
gctaggttgaactggtacagttctgtgtgtactggtgaatcggactcatttctgcactactgaaggagagaaatggacgcggctttcgaactgctgtattccttccagacccgatagatgaggttccaggtgctgaaaatgaacaattacatacaggaatagaggcctactctgcacttaaaaatatcttcaaaaaagttgctggtcaaggagtatgcagcaatggtccttcctgttgtgaacattgagtcctagtgggtgaggtgtgggttgttactattaaaaatccttgttgtattgggcacaagatagactgaaattgactgtagtcctcacggtgagtctaattgcagcaacatgtgaaaaaggcaggcaagagctgagtcaggaaaatagacaagcagggtacctt

SEQ ID NO: 110 - DNA, 326 bp, Homo sapiens
  Genbank Accession No. AA255480
gcgcacaaccaacagcgctcccgccccgtttttatttgaattcggagaaccagaggcgcctgcagattctggaggggtctcgcctgcccatcgctggcagcccgagatcctggggaggggatgccatactgctagagatgagggaagagagccccaagcaggaaaacattgatttgctgtacactcaaagggcatctcatgccttcagtccaccgcctcctcgggccacagcccgtgccctcgcgccggctcagactagctctggccctgctgctgtcgctgcaggttgtcgtcttcttcctggtggtcctcgggcaggggcggct

SEQ ID NO: 111 - DNA, 410 bp, Homo sapiens
  Genbank Accession No. AA256268
cccagcttttcaaaagtttattttaagtttggagactagacaaggtcatactggttttacatcctacgtgatataagtatatatacaaagaaaaaaacaacattggaatattacacagcttgaaggtttgcaaaggttatttgtgtcttagttatttctgcacttaatgacacatcagacgcattgagtatatttcataagttgttgactagcaaagatacaatcattagtaacccaagtcttcaaaattcacaccaaactttatgaagtcattcagaaagagaaagtcaatcctaaaattaaaattggcaactatgataaataccttcaaaaggatgtagatgtaatggagatgtttaaaagtttagtttcattaattgtaaaattagcatgttatatttactcaatat

SEQ ID NO: 112 - DNA, 355 bp, Homo sapiens
  Genbank Accession No. AA256294
acaactttaaaaaatggtttatttttttctttaacaaaatcgtacagctttctcaatccccaaattaaaaaaacagaaaacaggaagaaagggaagaaggcaaaggccacacgcacaggccggcccgcgtcacgcgcctgctggacggcacttcagggcacaacccacacgcgtctttggacttgcagacattccgcgaggcttctggcctctcgaaggcaaagcttttcagcgatttcattaatatttcattacgctgagatgagatgaaggcagatgctacagaaatatgtcagttaaagccacagaaacagaacagcttaagaagggctgggcgcccaagctcgtcacgaca

SEQ ID NO: 113 - DNA, 196 bp, Homo sapiens
  Genbank Accession No. AA257093
tggtgttttttcaggccagaccagaacatttttattggtttagtcacttaggcatgctaaggtccccctgggttagggagatttcagccgtgagtgtgcaggtgtgcatgcacattagggggatatctattgggatgcagagaggtgagagcagctcttcagaagcgctggcaaaagaagaatgtgtattgaaacc

SEQ ID NO: 114 - DNA, 284 bp, Homo sapiens
  Genbank Accession No. AA258476
aagcttacactgagaatttattggagggctttgagacagctcatgtaatggaaagctcttaagaactaggtttagaaggtgcagagaccagggcaacttcagggatccaggtagcaggaaggaatcggtagcctctttggtatggccactatggtggtagacactgtctacgttgtttgctgagtcttctggctttcttccactcttcctgctcttggacatcagactccaggttcttcagcctttggaatctaggacttgcaccagtgggttggttgccaggg

SEQ ID NO: 115 - DNA, 377 bp, Homo sapiens
  Genbank Accession No. AA261907
gcatttcaatagaactagctttatttacttatttatttatttaaacaaaagaaatggtttaaaagcaaatgcatatatgtaccaagggatggacatgacctggtacttacaaaggagctgctgtgtcataatggaaacagcatattaggagaaaaatagtatttcgtgtgctgtctgcttgagtaatcaatctggagatgcaagttaaccgaagtgcatctgccaagccatcagcgtgagaaaaaaaaaccaccagaagttgcctccagataacgatgtagtggcagcatgataactggcatcaactcacggtcttctcattttccccattttctataattttcctcttcttttcatctatttttttcttgaagatg

SEQ ID NO: 116 - DNA, 181 bp, Homo sapiens
  Genbank Accession No. AA278767
atacaaaatcagatctataatttaatgccattttggttaattaaaaatacatgtacactggacactactacatattagggagcatctatgcaaataaaaggaaacatcaaattcattaaaatgtttacctatgaggtaggggtaagaggttagatatgggagtaaggactggagattaaaa

SEQ ID NO: 117 - DNA, 419 bp, Homo sapiens
  Genbank Accession No. AA279313
tttttttttttttctttttttttttttttttttactgaaagaaaaaaaaatattttttatttcagttaatcgggaagctttgtcagagccctacccataaggagaagagacaacagctgcctttattcttgttggtttgctttgaatccgctccgtgtaaagtcagctaactctctcggtcacgggcgtccggctgtccaaaggctcctctctgtttggccttggaatggaggatgaaacaatgtctttgggctctccctcccctcggtgtttgtacttttctggggccgttgcggggtggcaacccggggctgagtcctaaccgggtccttggggcaaccgtcgctctccagtgaagcttctctgggcaacttctcctctttggaaaagctggtgctcaagtcctggggccagggggg

SEQ ID NO: 118 - DNA, 513 bp, Homo sapiens
  Genbank Accession No. AA279757
atttctgttgccatgttttttccagggcttccccgccccgttctcagagctcgcagtggatgcagtcactacaccactcccgggcttgtaacccatcacagcctggactcctttggtcaaagccctcacattctcttgatggaaaaaagttttgtcaacgatattttcaatctgctttgcttttttatttctgcctagctgcatttttatttcatcactgttcattttgttctctaggagtcgctggtgttgatgctgaaaagttacaggatctcttccaggaggaggatggcagtacagcagcttaccactgacatagtccttcaggatgtagcgcgcagatcgaggctggtctggctgtccatgcgctgtcatgaatcctcgcatgtatccataagctgtcaacagttcttccgatgttggaggtcggtggggatcttcatcctctctaggcgttatgatgttaatgccataggtagcttctaaaacatgtcttggaatattctggcaaac

SEQ ID NO: 119 - DNA, 256 bp, Homo sapiens
  Genbank Accession No. AA279760
ttgataaactgaacatagtatttattgaggtcaggatgcatgaatagactcttctcaacagaaagataattcaacagcaatcaatttacagaatttagaacagcactacatttcagcaaaatgcaactagagaacatcagataaattatagtaatttgtttttaaaaatccattaaactatctcttacctctgcaataatgtatcatacatgcagttacagaagttagtagggaaaagcatgatcttccttcccta

SEQ ID NO: 120 - DNA, 367 bp, Homo sapiens
  Genbank Accession No. AA280929
cccttttaaacattttattttgaaacaattgcagatgtacacaaaagttgtaaaaataggccacagtgctcccattttgtccttatatcagatttcccatttgtgagtgattctgaacaataagttgcagacatcttgacccactactccttactattccagtgtctatttcctatatacaaagggaatctaccaggtaatcatagtacaacaatcaaaacctggatgttaatactgatccaatatgaatataggatcctcaggtgccattcaacattttgcctcttctcctttatattttaaaattatatatgactacttacatttttctagaagaaaaaatagaacaataaatcacaaaaatgcc

SEQ ID NO: 121 - DNA, 427 bp, Homo sapiens
  Genbank Accession No. AA281145
aacagtgagatccacctttattgaaacatcacacggcagcatcagggctcccacacctcacagggcagcaggcagttcacaggacagcaggcagttcacagggctttgggggcctcacagggcagcaggtggttcacagggcttcggggggcctcacagggcttcggggggcctcacagggctgcagggggttcacagagcttcaggggcctcacagagcttcaggggcctcacaggactgcaggggggctcacagggccctgtatgcagggctgctggtacaaagaagaggcccagagaaccctaacacagcctggggccccggggaagtcagggcttccagcagggcaggtacagaggcccctaggacttggcaggagctcagccttggggacagtcccacggaagacgctgcatccgggctctt

SEQ ID NO: 122 - DNA, 257 bp, Homo sapiens
  Genbank Accession No. AA281345
ttactcttatggtttttattttcctatctgacatttctaacattagccatgtagacggagttaaaaagaatccaccgcacgaaaggtaaacaaagcagaccctcagaaactccctggcaaggaagaacccctccccagattggcccagtttcaccagcaactggtctcagctcagccttatgcctttccactgacaccccccacccctccacattctcgatgattcagaccaggaacttctcggctgattgtgtccg

SEQ ID NO: 123 - DNA, 365 bp, Homo sapiens
  Genbank Accession No. AA281591
tttttttaattattccttcatattcaaacttcacaaacagtgtgaacttgtacaatacctcggaaagtgaaacttacaaaaaaagtgctggtaacatttaaaaaaaaaacaacaaaaaccccaaaaaaacaaacatcattcttagcaacatcaattactcttccacacaaaacagaaaccttgtaaaatttattttcgtatttttaaggcgtaatacttccgtataaagtatatgcaagagataaaacttcacagtattccaaaatgtcacaataataataataatataatagtataatgaagcgctacagttaatttttctttttttgaatgttttttttcctgtttaaataacaaatacaagt

SEQ ID NO: 124 - DNA, 369 bp, Homo sapiens
  Genbank Accession No. AA281599
gaaaaggcatacaaatttattaaggtacagggctgaggaccacagaatattaccccaaccccccagtggttacagaagcttatatactctttctcagaggcaaaagaggagatgggtaatgtagacaattctttgaggaacagtaaatgattattagagagaaggaatggaccaaggagacagaaattaacttgtaaatgattctctttggaatctgaatgagatcaagaggccagctttagcttgtggaaaagtccatctaggtatggttgcattctcgtcttcttttctgcagtagataatgaggtaaccgaaggcaattgtgcttcttttgataagaagctttcttggtcatatcaggaaattcca

SEQ ID NO: 125 - DNA, 375 bp, Homo sapiens
  Genbank Accession No. AA282247
tttttttttttttttttacttttagttcacattttttaatgtttaaaaactatgttaacagagcagttatagaacagaacttcttatatttctttatttacaccacactctgaaaaaaaaaacccagttctatttgattaactatgaatagcaaagttttgtgacttgtgactcacttaaatcacccatctgaaattcatttacaaggtttttacattaataaaacagtagtgtggtacatgtattggactcagatgaagtctaaagtacactggactctagagagtggattacataccaacgaccaagattcaagtgtttggggaaaaaaataccttagacagtctatgttggcgtcaacactaaaataaaagg

SEQ ID NO: 126 - DNA, 242 bp, Homo sapiens
  Genbank Accession No. AA284153
tgcacaaaaaagagcagtaaaataaatactcagaactttcccaggttgtcaactattaaaataaaacctcagcatttcaaaaaagcttattccgctgcaggaaagaaggtggacatttttggtaccataataaatcacacactcacacatccatattgcttaggttgaagagaacggaatgaacagaggaaatttcttccatgaattgccctcctttcggtacccgccatgttttagttacc

SEQ ID NO: 127 - DNA, 428 bp, Homo sapiens
  Genbank Accession No. AA284879
ttttttttttgattagtcaaatatttttattttgccaaagaactctaaaagcctttggtgattcccaaacatacaatgaaccccaaataaaacaaaaccaaattgcactattacaaaggaacaagtccatgaaagtagagaggaggcgccagttaagggacagcaacttcaaggagacggttgttttttcgtttacatgttgggacactcccatttttctggtttccctgaataaacttcacacatactttgtccggtctgaacaggtccagggctccaccggaaactccaatattgagcctccggttgggtttggcctaaaatttttgcggaagaacctgggtgggccatttcaaaccaagtggatccctcctgaaaagaaaagttcccttactaactgcttctgagccctcctttaagtggacggc

SEQ ID NO: 128 - DNA, 425 bp, Homo sapiens
  Genbank Accession No. AA284920
ataaagatttcctccaagccacatgaggactctggcacccacccacaaagcaagacctgtatttataagccgagggtcagggagctaactgcgggacccgtcagccccgtgtacccatccccgtccccacccccccctccaccgctgggcccatcagtgtgtgttggggggatgcttgcagctgggggtgaggagacaacaaacctcgggaactggagccagagctgcggcctgactgacgccttttgatgctcacgggaaatttctgcccaggatctcagccccaggctggttgtttctacaaatctctctcaaatgtattattttggtgacaaaaatgaaggagctttgtaaatttttttaaaattatgaatcatatcaagtagttgtttacatttcttgaaaaaataggaactcgggcagca

SEQ ID NO: 129 - DNA, 405 bp, Homo sapiens
  Genbank Accession No. AA287389
caaaataattaacctttttaattttttaaaggaaaaatactctccataggaaggcatttctattttttgtccatcagtagccaaatggaacttgatataaacacttccagtatgccaactttggtttaatgcacaactttgaaaataactcattaaaacacacatcaagatgctactaacaaattcattaatatccaagattcattactgtatgtcaaaggtcatccaggattaacattttcattacaatgaactgtgaaattccaatgaaaaatgtttgcctgaattaaattatttaatctctcaaattggaagtctagcactcttgaaaatcaaattcacacacacacagacacacacacacacacttacaaactgcacattaggacatgagggcaatttaat

SEQ ID NO: 130 - DNA, 478 bp, Homo sapiens
  Genbank Accession No. AA287832
  unsure (1)..(478): n = a or c or g or t
cacacacaaatcctgatttattccctgtttctcatacatcgttggcattgttctacttaaacagcgacagtgatgactccaaaaaaaatgtttagaattagaagtgcatgttaatctgagtaacttaagtacagaaaagagttagtacaccacaagcattttctacacttttattttgtggtgattgtgagacaaacacagtccaaacaatagacttcttgtcctccccctcccaacaactatctgactccatagctcatgcaccccaattacagcaggtgtcgggctggcataaaggcttcttaccaggattccagtttatccttctcaatccttttctcatctctaacaaaaatgccacacatacatgtagttgtgagaggcaaagtcttctttacactcaccaccagggnggcgtatgggagcacaaaagcctcacaaaactgctccaggatcctgcctcttccagggccggaat

SEQ ID NO: 131 - DNA, 216 bp, Homo sapiens
  Genbank Accession No. AA291676
ttacttacacctttctattttttattttttacatcaaacaggtaatgtgatgatgctgtaacaaggtttgagggaagcatatctgacacatgagcatgaaaccaaatcaccatgcttatggactacaaaaggacctaagccttttaaactagactgtctcaactgtgcattaattatgtatttagatataggatatgtgcttgggaaaatgtataa

SEQ ID NO: 132 - DNA, 431 bp, Homo sapiens
  Genbank Accession No. AA292328
atagagacagggtcttactatgttgcccaggctggtattgacctcctggcctcaaacgatcctcctgccttggcctcccaaagtgctgggattacaagcataagccactgcacccggccgagaggggtttggaatgaaggtagaggcagggggatgaaggcgccagagctgaagaccagcccccagaagccacacccctgcccttctagcagctacgggtcctctggctccgggccttgtaaacctcgatgagcaggtccttgacgtactggatctcgcgctccacggactctgcccgttccttcagctcgcgattccgtgcctccagcccctggaactcgaccctccagggcctcaccctctgcccgcttccgctggcggtacctcagagccgccgacttgttctggtctctctacttttgcttgcggtc

SEQ ID NO: 133 - DNA, 318 bp, Homo sapiens
  Genbank Accession No. AA293187
atggtacaaaaatagtttattacaaaagaaatccaaccaaaatgcttaataatttacatcgtgatccgtgcccgttacggcccacctctcccctcctcagttatctggtagagagtggaggggagtggctgttccctgggtccaccagctctgggaggggacatggaaatggaagatgtgggtggcattccggacagggactggtgcctgagaatgctggggtcagagtcctgggagggagcgagatgggggaacatctgtgctcagaagagggggtgtatgggtaggtgcatgtgcttctgtgcaaatcctggtccc

SEQ ID NO: 134 - DNA, 424 bp, Homo sapiens
  Genbank Accession No. AA293489
tttttttccgtagtccaaaggctttattgttctgctgaaatgcttacaaatactgaaaacccccagcctgggcccaggcaaccaagggctcaatgctgggaaggagagcaggggaggtgggcttagtgttaaggcgtgaagggcgaggccagacagctggaggcctggtcctccactctccatttccatcacccttcggaggctgaaggaagggcggcggcaccacagggcccttcccctctgctgcatcatctcctgctcaggctttctctctaggcgcattggaggaatcctctttccctgtcggaaactcaacactgtacagaactccaaccataacccttctagcttcctctcccaactgcatcgctcctcctctgttccatagatcccccggcttcatcccttctggctctaagcaagg

SEQ ID NO: 135 - DNA, 340 bp, Homo sapiens
  Genbank Accession No. AA298981
  unsure (1)..(340): n = a or c or g or t
attcggcacgagtttcaaagaaaatagattaggtttgcgggggtctgagtctatgttcaaagactgtgaacagcttgctgtcacttcttcacctcttccactccttctctcactgtgttactgctttgcaaagacccgggagctggcggggaaccctgggagtagctagtttgctttttncgtacacagagaaggctatgtaaacaaaccacagcaggatcgaagggtttttagagaatgtgtttcaaaaccatgcctggtattttcaaccataaaagaagtttcagttgtccttaaatttgtataacggtttaattctgtcttgttcatttgagtattt

SEQ ID NO: 136 - DNA, 535 bp, Homo sapiens
  Genbank Accession No. AA308998
aggctctacttcaggtgctgctataatgcctcatctaatcaggactaaattgtgtaggaaactgcagtgggaagaatatgctttctgctcaggctaagagggtcactgatctgtccttagaaattcagagtaacatgagcaaaacctcagctaaaacccatttaagtggcatggattgtgcatgatctttgataagaattcctcatgtacttgtgcctagtttttcaaggtattggctgttctatagatgcagtgattgtcccagctagctctgttaccagccttttggtgtgtctttatgttcatttggagagtcagggcgaaagacaggtgatgtagcacttctgtttttaataattattgcttaaaatacctattaatagttttgggtcatttaaagggacttgaggaagctacccaggattacagaagagtgtccacctaacaagatggtctggcagtttcctagttttgtatctggttcaatagaaatatgtgaaagtggtaatgtcatcatttgatgcagagtccgggg

SEQ ID NO: 137 - DNA, 324 bp, Homo sapiens
  Genbank Accession No. AA312946
  unsure (1)..(324): n = a or c or g or t
gaagttaaaggncactttattnactgacagattgaaaactgtaactccaggnagtgcaaaatgcaccacaacccaattacaaagaacaggtgttaacacacaatgtttaaacaatgctacactcatttttggcaaagtgctgtattgttcagtctgtgtacaaaactgaccatctatganccaatcagtataaaaaatttctataaaancaaaatttagncagtggctcaagaaaacaagctgccatttatgcatagnntgatgtacagnaacctaaccaaatgtcccttttgaattttcaagttactgaaaaaaaatgtgtcg

SEQ ID NO: 138 - DNA, 428 bp, Homo sapiens
  Genbank Accession No. AA316686
gggatgtggagctggagttggagactgagaccagtggaccagagcggcctccggagaagccacggaaacatgacagcggtgcggcggacttggagcgggtcaccgactatgcagaggagaaggagatccagagttccaatctggagacggccatgtctgtgattggagacagaaggtcccgggagcagaaagccaaacaggagcgggagaaagaactggcaaaagtcactatcaagaaggaagatctggagctaataatgactgagatggagatatctcgagcagcagcagaacgcagtttgcgggaacacatgggcaacgtggtagaggcgcttattgccctaaccaactgatgcgtgctttctcaaatatacctactggattaatttatggcaataaaatttttttttgtctttttcagttttatc

SEQ ID NO: 139 - DNA, 160 bp, Homo sapiens
  Genbank Accession No. AA328993
  unsure (1)..(160): n = a or c or g or t
gctttagagcagttatgggagttatagattataacatattagtgatttgtgaaacttttttactaaaatgtgaccctcattttnctttacatgaaagaacatagaatatttcacaatgcatcccacgtggtaagaataaaaaattgttttagttatatgt

SEQ ID NO: 140 - DNA, 359 bp, Homo sapiens
  Genbank Accession No. AA342337
  unsure (1)..(359): n = a or c or g or t
agagataaccagtttattttggggagcaaagagaaagggtccctaaccccagactgcctgcgaagaggtgaaatggaattgaatgggattatggtcagccaaggcttcctagtggagctgctacctganctgagttttaagaggggtaggaaagaaaaaatgtagtgggtcataatggcattccagatacaggggacacaaacagctctgtgtttatgaactacaaccagttgttgacttttgtttcaagtggctccccttccccagtgctgtgtggacgatggactgaagaggagaaggctgggagcaagggaccagtaagctgttgcagcagtgcaggtgagatatgaggcctcaac

SEQ ID NO: 141 - DNA, 346 bp, Homo sapiens
  Genbank Accession No. AA347359
  unsure (1)..(346): n = a or c or g or t
gtgttgcaaagcctttaattagaatgtttgtattttttacatcatgcataacttcacatttgtgattaattagtaattatttcaatacttgtaagcncatctgcctcagatttaatcataatacatgaattaaattaatcaaattaaggaacagcaatttagaaagaaacacactttaagaaatcaaaattctcaattcaggcagtctgtttctatcatttggtattctactcctttaaaaatttcatattgcccaacaaaaagtggttatttttactgtttttggagatgactgaacagatgaagggcatcagatgccttcatcagctgggtattttgcctaaga

SEQ ID NO: 142 - DNA, 196 bp, Homo sapiens
  Genbank Accession No. AA350265
  unsure (1)..(196): n = a or c or g or t
caatagcagacttttaatcaatgccagagacaaagtgaggccgagctaagaacacgctcagctncgttacaatgaagaaatggtttcctttcgatgcaaagtataattgtaaaccacagtgctcgcacagttcacgnctgnttaaagngaaatcttagccatacatcacctaaaagtaattaaaaagtcaacacag

SEQ ID NO: 143 - DNA, 286 bp, Homo sapiens
  Genbank Accession No. AA358038
  unsure (1)..(286): n = a or c or g or t
caggttatttctctttctcctttttaatgtagagctgcagatacacttaagttgccatagtaatggcagaaggagggaagggtgttttctttgtaaaatcattggngtatacaggatggcttggcaggtaacaacactatttctacgatatctacttattaatataattttatgttaatatcccattctcctcaccataatcaccataatgttcaaattttaattttgtattcattttgaatgtttgcatgtgaaaacccaactaatctattatttcaacattaag

SEQ ID NO: 144 - DNA, 287 bp, Homo sapiens
  Genbank Accession No. AA374109
  unsure (1)..(287): n = a or c or g or t
cgccgaccatctctgcactgaagggccctctggtggccggcacgggcattgggaaacagcctcctcctttcccaaccttgcttcttaggggcccccgtgtcccgtctgctctcagcctcctcctcctgcaggataaagtcatccccaaggctccagctactctaaattatgtctccttataagttattgctgctccaggagattgtccttcatcgtccaggggcctggntcccacgtggttgcagatacctcagacctggtgctctaggctgtgctgagcccactct

SEQ ID NO: 145 - DNA, 292 bp, Homo sapiens
  Genbank Accession No. AA380393
  unsure (1)..(292): n = a or c or g or t
catggagtcagggacatgtttaattcatttgtgaatcccctggtactggcacatagaaagcgtcccatattatctgcaaaatgaatgantgaataaatgagcaagtaggtgaatgantgattctnaggtctcctccagctttgatggcctatgaccgtgtgactcctgcatatgcatgancacacagacacagacactacacacatgcacagacacacatacacacttggngcaaagagggatgaagcctgccacactgcaggtggtcctagctgcctgacctcccttcctt

SEQ ID NO: 146 - DNA, 255 bp, Homo sapiens
  Genbank Accession No. AA382275
  unsure (1)..(246): n = a or c or g or t
aaataataaatgaaagattttattcatctttgtagataacaagcactcaaaggttaatgagtgaaggagataaccatctcctccaaacaaagnggctcttaataacgcagaagcaaaaatctttccacttttagatgaaaacaaactaaaaaataacttcaggcttcagatatggaaataaagcaccatttttcaaatggtagacttggcttacttaaaataagtaaatagcccccgnctatctgaaaaagaaaa

SEQ ID NO: 147 - DNA, 407 bp, Homo sapiens
  Genbank Accession No. AA386264
  unsure (1)..(407): n = a or c or g or t
ttatttaataactgtagaaatccaaaagaattagcatcaaatcttgaagtcgtgagtnaagctgcgggttggcttgactgggctcagccactgagctgcctcaaccggccaaggaacgggattatgatgactatgcggacttctatattgtcttcatctcattgtgtgtattatgtatttagtttcaataaagcatttgtaccaatggctctggagcttggaggaagactaaaggaatgtgtagtgattctgaagtaagatgtagacctacgcagcagagctatgggggagaagattaacaaagtcctttcttccaatatcaggatagtcatgagttgcagtcccatccaaaaggtcattagggctnaaaggccctctgtgtctctgaactatgagattcttgctcc

SEQ ID NO: 148 - DNA, 205 bp, Homo sapiens
  Genbank Accession No. AA386386
  unsure (1)..(205): n = a or c or g or t
ggnggtaaaattncaactttatttggccaatgtgttcaattcgattgtnaaatagaaatgcctganganctgtnagcgtctgattcagctccagcatccttcttcaggccaaagaactcgaggatgcgctggttgtcggtgtggtcgctgtcgatgaagatgaacaggatcttgcccttgaagctctcggctgctgttttgaagt

SEQ ID NO: 149 - DNA, 440 bp, Homo sapiens
  Genbank Accession No. AA397919
ttttctgtttaagaacagctggtttattcttttgatttattgtaggtattaaaagtttcttttgtgagatggcacataggcaggtttggtgtttcctaacactatgaatatcttaaattgcttttgaaagttttatccacaaagaaagaaaaataagggtttcctcacagttgaaaatagtttttgaaaaaaggttaagaggaaaaaaatctaaataccatccttgataaagaaatggaacttcaagttaaaaatacaaatttaaatgaagttttataaaatattaaaaactagctaaaagtacatgcataggcatttaatcaaggtaagaggaacagcagtggaacttaaatatgatacaatttatcaacaataaataaacatttcagtgcaaatagtgcagaaaaatttctcaaagatcatagcaatcattctaatcg

SEQ ID NO: 150 - DNA, 425 bp, Homo sapiens
  Genbank Accession No. AA398280
tttgcgtgggtcattctgatggtggctgctgtcagcctccaagtggcttatgggataggacaaccccccaggcacttcactgtaggacagttagcaccaagagctaaggttgtgagataatgcaaatctggcctgtcacctctgcagagtacaggttcccatactgtgaggcagcagcagcagagggaaccaccagagaaacagcatttcagaattgtctttcctttggtgtatggatatgtgtgtgttctagtctttggtgggcaatggaatctgcagctccatgacaatcttgttaagtagcttatgtgggaagtgtttcaggtcacaagggccacccattctaaggcttctcacttaattccccaggctaagagacaggtggggaaaggaaaaacctagcaccttgctatactgaattggaa

SEQ ID NO: 151 - DNA, 382 bp, Homo sapiens
  Genbank Accession No. AA398903
tttaaattagtagagacagggaatcttactatgtgacccagactggtcttcaattcctgggctcaagcgatcctctcgcctcagcctcccaaggtggggttatatgcgtgacgcgctgtgcccggctccaaagaacatttcttaagattggtggtgcaaggatcacaccttgagaaacactgatttaggccttcccacagtacaaagaaatgttgcctgccccatccttacagcacacctgatgacttacaagaggtgctgctgaattcctcccagggaagcaaccttaattcttctcagcaagacaaggaggcagccttcaggaaggacccaggagcttggtattagaggatgatccaagtctgatggcaaatttagagtg

SEQ ID NO: 152 - DNA, 449 bp, Homo sapiens
  Genbank Accession No. AA398908
tttccagatttataatttaatggctgtgcagatcccagtccctcatttctgtcgctcacgtgcccactggtctggggtcagggttttctgttcaaaggcatggatgtgcgggactcttctgctaggcacgcgttcaccagcctgtgtctctgaagcagcggtttcccctcgaacttggccgacaccaccaggactcggaagctacaggagcaacggttgagggtcgtgtcctccacctccacatgctccgcctccaggtcccgctgcagcttctcgcggaggtattcggcgctgagttccatggcggcagtccagctggaacggcagcccagcagggacacaaccccagctcgggcgccggcacgctaccttgctgccttacaggagccacttccgctggaaaactcacttccgccttactaaggcgtacgtcaacgcagtacttccgc

SEQ ID NO: 153 - DNA, 333 bp, Homo sapiens
  Genbank Accession No. AA399273
tttttttttttttcagaactatctgatatttatttcccaatattttgatacttgttttacaactggaatacatggaatgaaggggctgatatgggaccccaggtaagagtgaggtcaggactctctaagggtctggggttccccctagagggactttgggcatccagtttcagggactgagccgggttgggtcggggggcagcatggcatcggacgtggtgccgtctgtgcctctcctgcctgcggtacagccggcgcaggtgtttccgaacggcccacagcaccaggtacacctcccacagcaactcagcctccggagtcttcaaaggtgac

SEQ ID NO: 154 - DNA, 467 bp, Homo sapiens
  Genbank Accession No. AA401433
ttttataaactttattacggaaaatgccaaacatacaaaaatagagatgaacatatataatgaaccatcattttagccatcacccagcttcaacaattatcaaggccaatttcgtttcatcaatatttccaatgcacttaacatccagacttattattttgaagcaaattccaagaatcatatcatatcagccacagatgtttgagaatgtagatgaggacccttctttctaacataatgataaaaccattattctaataccaaataccccaccaatgttcaaattaccccgattgtctcataaatgtattcgttttacagttcggtcaaatcacaattcaaataagatccaattaacaattggttaatatgtctcttaagtctctttaaatctataggttcatcctccatctttcatccttgcaagttatttacagaagaaactaggtcatgtgtcctgtagtttc

SEQ ID NO: 155 - DNA, 378 bp, Homo sapiens
  Genbank Accession No. AA401965
gagagcacaactccaaatcatcttttattaatataaaaagggcatatttagcaaaagacacacagataaaagagtcactatggctcaggacacaaggcagggaggtgccaggcctgtgcccctgctgggggagaaggaggctcgggacaaagtgggagaagtgctgggaagggctgagcggtaggggccacaaaagttccggtgggcaacactgtcggcaggtcatgggtgggactcatggggacctcgctgctaactcttgttgtgggggggtgtccttagtgctgccacctggagggccactccttggttcctggaggggacccaccaagggacacaggacaggaagcccaggatggttagtgcaactcgggatga

SEQ ID NO: 156 - DNA, 641 bp, Homo sapiens
  Genbank Accession No. AA402000
ttttttttttgatacaactagcaaatgttcattggtttacaacaaacccaaaatactcatcaaatatgggctgttggatttagaaaaataagattcttgagcgattccagctgcatttgtttatacagaacacatttactcaggaccctgcagtgtcagcttcgttctttgggtatgcagccttctatctggatctctgcaggccagccagaatatctgttgttcttagcatcagagtggttgatcttttctctctgaatttcggaagggagttccaagccttttgctgcaataaatacccagctagacctgaatttcatgttcctgatttctttacttccaagtgcttctatggcattcttggcatcgttattcagtcttgtgcttccgtcgtcataggtcaccatgaagagcagggattttggagcagcactctgaataaactttgtcatcggtccagagttatcgccttcatacatatcaaaacatcgtgttgctgtcacattcccagttacatagttgacaatggcaatgtttattcctctggcaacatttcccagctgttctcccataagtaggttatcctcaaagcagattttggcgtacttgcttctgccacctccgctgagtaacctgtaggc

SEQ ID NO: 157 - DNA, 290 bp, Homo sapiens
  Genbank Accession No. AA402224
tttgtttctaaaaagtttattgtaaaattcaaagcttcaacagcagcatcctttagaaaacgaagcattgcccggatccgttttgaaaaagcagcgcagtcggctaagtccttcacgctcctgcaactgtaccaagtccagggcgccgctccttcctgccgagcgcaggctgctgagtcacgcctgcccggccagtctgtccttcctggccctgaggccaacgtcctagcctaggccttcctgggcgagcagccgctccagacacttgcagagtcctcagctcggaccag

SEQ ID NO: 158 - DNA, 269 bp, Homo sapiens
  Genbank Accession No. AA402903
cccagggcagtggtgggtgctttatttccatgctgggtgcctgggaagtatgtagacggggtacgtgccaagcatcctcgtgcaaccggagagcccggggaggggctctgcggccgtcgcactcatttacccggggacaggagaggctcttctcgtgtagtggttgtgcagaccttatgcatcacgggcatgagaagacgttcccctgctgccacctgctcttgtccacggtgagcttgctatagaggaagaaggagccgtcggagtcc

SEQ ID NO: 159 - DNA, 359 bp, Homo sapiens
  Genbank Accession No. AA402930
gatttgcatgttggctcaactctttttaagtccaaggaggcagtccacattaagtgtgcaggcaaaaaagagatggaaaaaggagtcagtttctcccctgccctccctctctccctttatcaagctgagcaccttgagttgcatttgaggaaatgaaaactataggtgacgcaaccccattgtgtcgaattctttctttacattttttgggttgctacaaggaatcagtattttttttttttaatcagatggtgtgtgtggtggctcacatctgtaatcccagcattttgggaggccgaggcaggaggatcacttgaggccagaagtttgaggctgcagtgagttatgatcatgccact

SEQ ID NO: 160 - DNA, 394 bp, Homo sapiens
  Genbank Accession No. AA403159
tttttcattgtgcaatacacttttattttccttttacctttgcagtcatcttcgagtaatcgttgtgtaaacaatagaatggaatgaaattacattaaattgtatgcaaatggctctagaacaccttaacaattatgacaaggcaattataaataactttttttccttagtaatatatatttgctttttgaagtacattaaagagctgccatatctagggttagctaggaaagagcaatggtaccatcctgggagcccacctccttgaaagattagactccaattttcaaaatcctaaggtttactagttccataatatacagtcaagcagagggctacttgggttgaaagtattgattcttgaaccttaacagcgttttaccttttagtcatt

SEQ ID NO: 161 - DNA, 376 bp, Homo sapiens
  Genbank Accession No. AA404957
tttaatgaaaatagaagttttctttctgtcctcctttctctcctccttccttctcctttccggatctttccccaaataattttctaataattcagttgttttctgaatattgcttttaagttttttgattttaaagatacaattagaaataatgtatatgatgaaaaagctgtttcccactccaattcagatctgtgatctacactgggaaaaatgaccactcctcatgaagttttgttactgacctctcttggactttagctctccatctctgctgaggggatatgaaggtatttgcatttctcctgttaatgaagggatcttagaacagaaaataaataaatgcagttttagcgacacatagctggaaatattt

SEQ ID NO: 162 - DNA, 207 bp, Homo sapiens
  Genbank Accession No. AA405488
tttttttttttttttgacggttcctatataacgtttatttctggaagttaaagtagatacagcaatataccaaaaaaaaaaaaaaaaaaaaaagacaaaaaacctcacaataatataaatttttacactatgaagtacacattggaatttgaatgcagtggccaggacagcagcttataaaccaccttataggtaggtaagcaaccc

SEQ ID NO: 163 - DNA, 348 bp, Homo sapiens
  Genbank Accession No. AA405559
tttttttttaaaatattctgatggttttattaacaagtatataatatatattgcatactgtatatagtatatgaggactgtacagtacaaatttatgttcacagtttgacatgacaaaatgtcattactgaattcccattggactacagagtagaaacagagaaggtacattaaacattcacatctttagtaagaaagattaccaaaatgtttcagtatctgcaagtatactaacgcatgctaaaaacctttacccattcagtcttattagcttataaaatatattacactttattaaaaatttctgcatagtttatacaagtattaaagtactgtaaatgtaataat

SEQ ID NO: 164 - DNA, 359 bp, Homo sapiens
  Genbank Accession No. AA405616
tttttgtgttttttgtgagttcaagtggtttatttggaggcaatcccaggaaacattagtaggagagcagcaggaagacagagcaaggaggaaaggcaatcttttgtgtattaataggcagcttatcacatgagcagctagagctccatccaactggggacctttggaagagagtgtagaacacatcttattcagagttgtctcacttgcggggtgaaggttgaagactgctccttggacaatgccttctccatttcctcatacttttcacctgcctgtgattgggccaagcctggttcccattgcccaagaaagctctcaggaagatgctcaagtgcttgcagtaagaagcaatcagc

SEQ ID NO: 165 - DNA, 346 bp, Homo sapiens
  Genbank Accession No. AA406371
tttttctcagtcattacttttcttcggtggcactttgttttcttgtgacagtgaaaagggtactgtggagacgagacagccccattgcaatttatcaatgaaaatctaataccgcccataagcagagaagtggaaatcaatacttcattaccaaattgttagtgaggatgaagagaaatggctggggtgattttttttttttttttttttggcagtcttctcagagccagggtgtcaggaggagttcaatgagttcaatgtcagaagcaggatggtgcaacgaagaagggttcagtgtgaggggatccaggctggaaagtggaaactaaggcattcgtcctgcaga

SEQ ID NO: 166 - DNA, 143 bp, Homo sapiens
  Genbank Accession No. AA410298
gcaggctagaaaataattttaatgcaaagtagaaagtatcaatccacctcatcactttccttgctctctctctgtcacctcctctttcctgtggctctgaggaggtgggagaagcaggcagtatttccacagcagctgtccat

SEQ ID NO: 167 - DNA, 298 bp, Homo sapiens
  Genbank Accession No. AA410311
ttttttttaaagtaacatttaatgaatacacatttataaaagccatcatcccttaacatggggaaagtgtacaaaaataatgtgaaagtgtaaaaatttttctagaatacaggaaacatatcagcagtaaagaagtttagtttaactttttttttaaatgtaaaatagtttggatctgttaaaaggaatacagttcgcccaaagcacttattttcatctgttgtaaactcattctttctaccttaagtaaactggaggagtcagctgtgttaatatggtcaaattaatttcatagttt

SEQ ID NO: 168 - DNA, 445 bp, Homo sapiens
  Genbank Accession No. AA410355
gcagcggattgggggtggccaggggatgctgctgatgtgcagagacatccctttttccggcacatgaattgggacgaccttctggcctggcgtgtggaccccctttcaggccctgtctgcagtccgaggaggacgtgagccagtttgatacccgcttcacacggcagacgccggtggacagtcctgatgacacagccctcagcgagagtgccaaccaggccttcctgggcttcacatacgtggcgccgtctgtcctggacagcatcacggagggcttctccttccagcccaagctgcgctcacccaggcgcctcaacagtagcccccgggtccccgtcagccccctcaagttctccccttttgaggggtttcggcccagccccagcctgccggagcccacggagctacctctacctccactcctgccaccgccgccgccctcgac

SEQ ID NO: 169 - DNA, 415 bp, Homo sapiens
  Genbank Accession No. AA410383
aagtaaaatgtttgctcaactttattgaatgtcattagatttataggaatcattaaagaattagataccagagtccccccggcccagacccccacaaaaaaagtcagtgaaaaagatgtgagtgaaagaagtttgtcaaggcaaatgtgtgaaaggatacatgtgtacatcaccctttaaatgctttccctgagtattctatgaagtctggggatcttcgaatgctattaatcttagacagtaaattttataaagaaattctttaaaagtaggacttaattctcctccgtagtgagtttttaagcagaggatatctactacatggattcctttgcctcttgacaggctcaagttccatctgcctcccaggcagctttttgagtctttcatagaagcctgcttttaatatatgcca

SEQ ID NO: 170 - DNA, 406 bp, Homo sapiens
  Genbank Accession No. AA411860
tttttttttttttttagattctcacaacctcttgttccgcagttcattaatccgactctgatgctaaggtgacagtgtatgtaagtagatttttgttttcagtgaaggagacctgggaaaagatggatttctctctgtatcttcaagagttatcagatggtacatgctcctcaaagccctcactctctcgaactagagcacgttccaggatcacgcggccttccttatatcgctggctgtcttcagtggcaaactcatagatccatcccagtttgctattgcagtttttgcagctcacatctcgaaccatgtggcggccagtgagcatgacccgatcttgaacttcactgtactgcaggttaactaccttgttaaaaagaaatgctctgccagtggggcctgtgaa

SEQ ID NO: 171 - DNA, 73 bp, Homo sapiens
  Genbank Accession No. AA411952
tttcatttaattgattttattataactggattaggtctgagccctgggaaacagacatcaccttgttatacag

SEQ ID NO: 172 - DNA, 289 bp, Homo sapiens
  Genbank Accession No. AA411981
acactgtttattgagtggcaggcacaggagaggtagctggctccggtgtggaagcagaggtggcaggtcatgccagggtgctgtgggcatctggcagccagggccatgcccccatcctagggggacggcacaagctcactatgacaggagcagcaaggagccggccagaggagggggtagccacgacccccaggatcctgggcaagaagcggcagacaaacttggcacaggggcctagggtgagggggactggggcctgggtattctgtgggggagggagggggatcac

SEQ ID NO: 173 - DNA, 406 bp, Homo sapiens
  Genbank Accession No. AA412049
ttttaggaaaaaacggcacagtgatttaatggtaagtcactataaacatgaagggaaagactgccatccaaggaagcgcagaaaaggacacccctcaggtcctggatggaggaggatgacccccaatactggatggagaaggatgcccccagtcctagatggagaaggatgcccccctcagtcctggatggagacgtcatgagtaactgtcggtaggaaacatcatgttcttcattctgcccttgctccttgggctccaacaggaaaaaccagaaattctgtggatataaaacatggaaacattcattctttaaagaaaaaggctgcagagacaagaacagcgaaaggatggtattgaatacatgcaaatggataaaatatgaatgattatgttctcatgttcaac

SEQ ID NO: 174 - DNA, 521 bp, Homo sapiens
  Genbank Accession No. AA412063
ttttgcaaagttaacatttttattgaactgaaattggtgtagaacaggggcaaccacagctgctgagctctgtaacaactgaaaagcccctgtgacattttacctttgagagtcctaacacggtttgagtggaacagctgagaaacagcatatatatattttaacacctcaaaatagtttgaaatgagcctcacagccttgttcaatcttcagattacaaataacattgatagcatctcctgtggccttcagttagtagtgccagttaatattgtttctgaaaactttcctctcaaagtgctggctataattttttttccatccagtacacataagaaaaggatttagtaacacttgggcaagtaataaactgtagaactttaaaagtagtaaaggcatataccaagcatacgtgactccacacattgtcagaaaggcagtggactggctaacgagtttctgccaagtttcagaagcaaagaatgcactaatgaaaagggtaaggcatccaagcagagtgt

SEQ ID NO: 175 - DNA, 387 bp, Homo sapiens
  Genbank Accession No. AA412505
ttttttttttttgaataatataacagttttattataaatcaaaacaccaaacttttgcaaactttacataaacgtgtagccatatgactgtataacaagagcccaagagcaaccattgtctaacaggtagaaatgcagacagtttcatgttaagcctttagaatttcctttcacggcaggtttccaaaataaactaacttttctaacatttattctcacaaaaatatatttcaagttagaataaacaactcattggcttcagacatttaattgtatgtatttaaccatactcagataattgtcatatttagccaaatggaggctttttctgtgacctatttccaaattctcagattctggttcatctactccttcaagcagtttgga

SEQ ID NO: 176 - DNA, 399 bp, Homo sapiens
  Genbank Accession No. AA412722
ttttttttttttttttttttttttttttttttttttccggcacgaggctttttattctaacagcactggggggcccagcctacctgccagacagttcccaggagtgaggctggtctttcctggcagataagacacagttttgttgggtgaatgagcggctcctcccttggtccaggaagagctccccctgcattgggtgatgaaattctgtctttctgaaggccgggcagtgcacagcggcccttcctctctgggaatgcccaggctcacacagtccacttcagacacctggtctcctggtgggtccccagacagcgcacagtgcagtaccgggcaccgcagctgacacaggtgtagggggatgggaagccacagacagcacagaaggggcgctggggc

SEQ ID NO: 177 - DNA, 427 bp, Homo sapiens
  Genbank Accession No. AA416685
tttttttttttttttttgctataagataatttattacagactagcctataatctcctgtaacaatggcacatataataattaacaacagcaaagatgcttggtttcttgtttcatgtaatggccagtacatctgtggacaatgtcgagtcctcaggaagtccaggaggctgctacagaggaaatccaagaaccatgtcacatctctcaacaagtcttgggaagtccatctgactctctgaaacagtttgtctctgacctcccaggaagtgtggagggccccttccatccagcctgtacagagggatcagagtccaggctccttctatagggttgaatatcagaggggaatagcaaatgaccccgatgagagagagagagaccaaaggctagattctttctgcaaggtggaggacggctagaaggcag

SEQ ID NO: 178 - DNA, 527 bp, Homo sapiens
  Genbank Accession No. AA416762
  unsure (1)..(527): n = a or c or g or t
tttttcctgtttctgtttttagtttttattaaataaaagcagaggaagaggaaggcccctggtctcccgggctaggggggagagccatgggtcctcccctccctctgttcaaggtgcactgcgtgctgggcttgaggtgtaagctggggagggagggcagccgggaagggtcagtggtcgggacctgcaaccctttcaccccttctggaagactcgctgggcagggagggagcctcctggacctggactggggcttatcccaagggatgagagccgataggtctacaggctcggcccaagggcccttccaccctaggaagaggaaggggtgccggcgtctatctgctggagggtggtcaggcaaggctgtggggctgggtggccagcccttcactcgtggacgtcccagatctccgacagcagaggcggcagcttcttgtcctggagccgcaagganngacctgctccgagtgcacagagctcagcgtgcgcaggctcaccagcttcatgagcatgcgcgggaagag

SEQ ID NO: 179 - DNA, 368 bp, Homo sapiens
  Genbank Accession No. AA419011
tttttttttttttttttcaaggggattttaatgaaattttattaaggagatgagaagcagggagtctgtgttgaaaattcaataaagggcttgttttccatctcagcctggataatctatgttatctctgagtaaagggggtaacaattctaacaacctggcttccttagaagtttccattctcatatagtcaccgaaggcagcagcactcaggcgtttgctgccgtgcctgccctttggtttctgggacggctcgggtcccgtagcgccggcacagctgagattgccaagccgggaagagaccttgctccaggtgtagctgcgttttccccagatcacctgtccttttcccctccgacaaggaagct

SEQ ID NO: 180 - DNA, 260 bp, Homo sapiens
  Genbank Accession No. AA419546
cacattaaattatttattgaacaaattgaagataatgacatatgtttttattacaaagtcttccatcatcttatatcattgacacatattatgagacctgcatttgaagagtgaatagaaataagaaaatgttttcccaaccccacaaaaacagaaaaaaatatattaattttataattatcttataaagccaaaagttttatgaattatactttttttattagttaaaaatgacagcataactaaggttaatttttatt

SEQ ID NO: 181 - DNA, 412 bp, Homo sapiens
  Genbank Accession No. AA421562
tttttttttttggagaaaacagaacacccccaaaacatttattttttttttagaaaatcatggctcactatggtagtatacaatattgttttcacacatgtacacttgaaaccaaatttctaaaacttgtttttcttaaaaaatagttgttgtaacattaaaccataacctaatcagtgtgttcactatgcttccacactagccagtcttctcacacttcttctggtttcaagtctcaaggcctgacagacagaagggcttggagattttttttctttacaattcagtcttcagcaacttgagagctttcttcatgttgtcaagcaacagagctgtatctgcaggttcgtaagcatagagacgatttgaatatcttccagtgatatcggctctaactgtcagagatgggtca

SEQ ID NO: 182 - DNA, 329 bp, Homo sapiens
  Genbank Accession No. AA424530
ttttttttttttttttgctgatcaaattcatttaatctttgttaaaagcatcacaaatgattcatcgatttttaaaaaggaaaaataagaaggaatgcattgtctctttgttatgtgcatggcagctgatggcctcgttcccaggcgcccaggtctacctgaacatcagatatgcagaccctcgaatttacaaccagggacagccacgggcccacgcctggatctccatgggtgcacagacgggaacgtatcaggctgtctcagatgccacctccttcccaggtgcttgggtccacatgcccaacatgttcttaatagaaatattaaca

SEQ ID NO: 183 - DNA, 305 bp, Homo sapiens
  Genbank Accession No. AA426372
gcggccgccggggatccgcgccgctcacccgccgccctccagctccttgcggttgagcttgaaggaaccgttggcgccggtgcccttcacctgcagaagcgtgtcgttctgcaccagcgccttgatcgagtacttgaggtaggtgcgcccattctgctggtcgaaccacggaaccttcttggcctcggtgtagatcttggccagcgacgagccgttgcgctcgcccagcctacggatggtctccaccaccagctggctgtacttgcccggctggttcttcttcttgctattcttcctcttcttag

SEQ ID NO: 184 - DNA, 486 bp, Homo sapiens
  Genbank Accession No. AA426374
tttttttttttggttttatacagaacctttaattgcaaagaacttgaaagcagccacgctggtgggtggcagtggagtggagaacccaccacaccctcccctcagtattcttcaccttcttcagcctcggcttccacggaatccacgcccacctcttcataatccttctccagagctgccaggtcctcgcgggcctcagagaactccccctcctccatgccttctcccacgtaccagtgcacaaaggcccgcttggcatacatgagatcgaacttatggtccaggcgagcccaggcctccgcgatggccgtggtgttgctcagcatgcacacagcccgctgcaccttggccaggtctcccccagggaccaccgtggggggcctggtagttaatgcccaccttaaatccagttgggcacaatctacaaactggatggtgcgctggtcttgatggtggcgatggcgcgttgacatctttcgggaccac

SEQ ID NO: 185 - DNA, 133 bp, Homo sapiens
  Genbank Accession No. AA427622
ttttttttttttttttttaataatcacgtaagatgcgatcatacttctggcattttcaaaaagtgaaaactgtataaaaataaatattccccatacaaacacacacacaggccaatccaaggttagaggcatc

SEQ ID NO: 186 - DNA, 448 bp, Homo sapiens
  Genbank Accession No. AA427890
ttttttaaggatttgaatctatgtatatatattttacatttttcaacatttgtgttttattccattaacataaccatttacagttattccagaaatttcagtcatacacagtgctcttgaatccaaagagtggtctagtgtgttggcattttcatcaagtacagtcctagaaaatgtcaagttgaacaataagatattgaggcacattggtcactgtgtattctgaattctttagtatggtcagaggaagtagttaatatatttcatgttgattctttggctactcttgatttttgctttgggtaacatcctcatcctgggaacattcattaccacttaatagcaagataacattaaaaaaaaatccttcattgccacatttaatagcatgtttaaaaaggcagaggttgcaatgagctgagaacgcactactgcactccagcctggg

SEQ ID NO: 187 - DNA, 159 bp, Homo sapiens
  Genbank Accession No. AA428325
tttttttttttgcacggcttatttcctttaatctttgcaacaacccaaagtataatagtaagcacagggtttttgcgtgatacccggtaggccttattaagaattagctcttattttcatcaaaggtagagaaaatgagtaactattgaggcccccgct

SEQ ID NO: 188 - DNA, 366 bp, Homo sapiens
  Genbank Accession No. AA429539
atcttgtttttctgatcggagcatcactactgacctgttgtaggcagctatcttacagacgcatgaatgtaagagtaggaaggggtgggtgtcagggatcacttgggatctttgacacttgaaaaattacacctggcagctgcgtttaagccttcccccatcgtgtactgcagagttgagctggcaggggaggggctgagagggtgggggctggaacccctccccgggaggagtgccatctgggtcttccatctagaactgtttacatgaagataagatactcactgttcatgaatacacttgatgttcaagtattaagacctatgcaatattttttacttttctaataaacatgtttgttaaaac

SEQ ID NO: 189 - DNA, 257 bp, Homo sapiens
  Genbank Accession No. AA429636
tttattttggaaaatgttaaaatttattaataatagttaacatcacatagttaattaaactagttatgtattgtacataatgacaacatcttcactagactgagtgctcaaggatttgagatgattcgctattcatcacaccccgaagattgagatccactgtatttacacaaagcaaagccatgtcagcaagggactgtcaacctgattctgagaacataaacattcaaaatttattttccagtgttcctttttgg

SEQ ID NO: 190 - DNA, 428 bp, Homo sapiens
  Genbank Accession No. AA430074
tttttaccattagattgtaaatttaatttaaaataaaatgtccctaaaatcatctcagtacttggcacactgacttaagatgtggggttggggagcatcccttaacacattctttgttttcctggtaaatactggtggaacaagacagctgagaatgtatgacatctgaccatgaacatatgacagctgtttgtgccagtcatgtccaaacccatggctctcaactccagatccaaaaactctccccatgttttagacctcccacaccagcatttaggatttcttcctctataatcttgctgggtgctggtcttggcagggcatctactggggataggtggtttggggtctcagtggtgggcaccggcttgttcttgcctcctctgcagctcctcttgccgcctcgcctgctgttcactcatgcaatc

SEQ ID NO: 191 - DNA, 335 bp, Homo sapiens
  Genbank Accession No. AA430388
gatgttttatagtcctctgtttcagtgccttccccatgcccatggagctgtcccaaaacccatccctcagtatttgttgatgccaaagacacgaaccccatggaactggggcaacttcggcagcagtacacttagcaatgaggctgtgttgatgaggaagtgcgcacatcatacttggtatagaagctggccaggagatagagcacaataggagagatgctgaggaacttgcgggaagaggtaaactggagcccatagtccatttgctcccagtgtgtcagtagccgagcctttccttggtcaggagtctcaaagggtgtccctttcaccgtatg

SEQ ID NO: 192 - DNA, 259 bp, Homo sapiens
  Genbank Accession No. AA431470
tttttcacacaaatcatcggcatttatttcctgggtcctaggtgtcacttatcctggtggacagggcagaggtggtcagatcgttttgagccaaaatcccttccctaaaaatggatctgtggagctccatgagggaacctcagagatgcacaatgacagtttagctaaaatggcttaaaaaatgtgaattgattgtcagctctctccatatctgctgaaaaaaggtttaaaatttttaaaaagtttaaaagtgttttct

SEQ ID NO: 193 - DNA, 489 bp, Homo sapiens
  Genbank Accession No. AA432162
tttttacagtttctttttttgcgttttatttttttcaaattgcattttacagtagaaatgcagaccactttggatagctatggctcgatacttctgggtgccctcctcctaagacatcctcttcttacattccactgaacagaaaaccatcccttctactggcatgaacttctgcccaatgaggcatttgctgcagcaagagcacagaaagcactctgtggatgcatgccagctgaaattgttataggtcacccgctgcacttctgggtcgatggcattgtggcatccttgacacaccacagcgtgattcttcacatagcagggcttgcacacgggcttgtcattgaccatcacgtatatctccccagctagaatgctatcacagtcaaagcagcagaagtgtttcaggtgccaattctggttttctgcctgggtatactcattgctgaatatcagctcgtcacagccagcacatcggggtttctcgct

SEQ ID NO: 194 - DNA, 367 bp, Homo sapiens
  Genbank Accession No. AA432292
tttgaggaatgagcaatttatttcaataaagagaaagcattaattttgctacagtgggaaaaaatgaactcaagagttgctacatttaactgtatccccatttatctctgcacgatgtcttatctcagtgtctcaattcacactaaaatattgaatgagaaatacaccacgttggctgattgcttgacatgtctgatttagggagacttctacaaccactcctctcttttttctcccagtaaatacttttgactttgacacctaccatattggaaatgacaggtgcccgagggcaagtgcatcaaagcagttaggattcgaatgcttgctaaggattatttttttaatggagcagttctattgaatc

SEQ ID NO: 195 - DNA, 323 bp, Homo sapiens
  Genbank Accession No. AA434108
ttattttttttttttttttttttgccatatttttaaaatactttattttttacataatactgtcattacaaaaaaatacaaaaaaactactataaaaacattcgggggttgtcaaagtgagaaaacctaaagaccccaccccaggatctggctgaagcagtcttcccccagcttcttcactatgacctttatacaactatgggggtggggtgggatcacacaggcataaaagggctggaaattccccacacagcctccaagggtaagaaatgagtagcttcacatatcacaaaagtgggatttggaagtttgggggtggctag

SEQ ID NO: 196 - DNA, 506 bp, Homo sapiens
  Genbank Accession No. AA435720
ttttggttttatacagaacctttaattgcaaacaacttggaagcagccatcccgggggtggcaggggagaacccaccacaccctcccctcagtattcttcgccttcttcagcctcagcttccacggaatccacgcccacctcttcataatccttctctagagctgccaggtcctcgcgggcctcagagaactctccctcttccatgccttcgcccacgtaccagtgcacaaaggcccgcttggcatacatgagatcgaacttatggtccaggcgggcccaggcctccgcaatggccgtggtgttgctcagcatgcacacggcccgctgcaccttggccaggtctcccccggggaccactgtggggggctggtagttaatgcccaccttaaatccagtcgggcaccaatccacaaactggatagtgcgcttggtcttgatggtggcgatggcgcgttgacgtctttggggaccacgtcgccctgtacaacatgcagcaggccatgta

SEQ ID NO: 197 - DNA, 265 bp, Homo sapiens
  Genbank Accession No. AA435769
ttttttgagctttggacaaatttattgaaacatacaggcggctgttagcagagaaatcattccatgattgatgtgttacatttggccactaccttgaatgtataatttaaaaattatatttttcacaactaagcctttggccaaaaaagtcatttagcacatctttaaagatcaataagaaatggattttggacattaaaaagatcaagtcactgaattaaacagtagcaacccccattaatctagaatcccatagtgctgaagg

SEQ ID NO: 198 - DNA, 437 bp, Homo sapiens
  Genbank Accession No. AA436616
ttttttttttttttttttttttttttgtaatttaaactttatttcatatctattgttaaattacacaaaatcagtgaatggtttgtaaagctacaccaatggacagatgtttacagttgaaatcatgggatttacataatggcaaaaatgtatatgtatatttataacatcctctatatacaataatcagtatagacagagaaaatgcacttaatctttgcaaatcatgcacaccacagcaataacacaaaatgttttttctgtaacaagcttttccactggctcaggcttcatcctgctttccaacaatacctatcagttttaaaagcaaacattttcaattaaaactaaagaaaattgaaataccatagtgatctactaactattttaaaaacacaattgtacacaaaatagttttactctaaaacactgtgact

SEQ ID NO: 199 - DNA, 443 bp, Homo sapiens
  Genbank Accession No. AA436618
ttttttttttttagcagttaggtgacaagcaattttattttgcaaaacaatcactatacagcaacaaatacatttgcaaatttgattgaaaaacatgaactaactacaaccagccattgaagaaatgcctttctatggtaacaggctctagaattatcagaagaaagaaaccccccacagatttgtaacagtgtgttggaacctcggaatcccagcatacagagtatacttttatgttgatttttatttctttttgctaaagttgaagtagatttttatgattgacattttattttctgagtttgaaaataagctttttcctgcagagagtcttggccttcacctacacacccaagctaaaaatcctaggtgtaaaaaaactcaaaacatcaatgcttattttagcacgtcaatctttgaaggaatgcttaaaatttccttac

SEQ ID NO: 200 - DNA, 219 bp, Homo sapiens
  Genbank Accession No. AA436655
tttttaatttgctaaactttattttatacatacacgtttacatttactagtcatggtgtcaacttgttaacacaacgaagccctaatggacccgttttgaaattagaagctggacagttacaggctttggtctcttcaagaatccaattcacccctgggtttcgcttggcacacaccccaggagaacgtcgatgcacacagctgtgtagctgcaaacgg

SEQ ID NO: 201 - DNA, 419 bp, Homo sapiens
  Genbank Accession No. AA436861
ttttatttaaattattttattgaaggagataagttactcagatattaactggttgtaggcaaagggaataaacatggtgaagtcaggtttgctggtaaaggggagacagtactaaacgccctgcccaacaaatactcagaatccagggttttcatatttctccatggttcaatctctcacaggtcactttccattcaaaggattatggagaccaaataagacaggattctttcaggtatcaacccagagtctttaggtcttctctcagccaaggcatcgagtgaaaatacaatttatttttcggattcctctggaggattaaaaagtttctttcgcattgcaatgccatgctccctgctcttggtcctgttttctacgtactgtcgtcctagctactcaggaggctgaggtgggaagat

SEQ ID NO: 202 - DNA, 292 bp, Homo sapiens
  Genbank Accession No. AA443114
atgtacaaaaacattttaattgaaatacctgtataaaaaaatatgatctccagacatctcacttttgaactgaaagaacccccatctgcgatgcctgcacacaccgcattcacacaaacacaggtactgaataaattaaacgctcaggctctggccccaccccagctttcagagcccacaagcagactgtacaaagtcaataatttaaaacccaaaccctgggcacagtgcctggaagtgtcagggtcacccactccccttaagttagccactatacatgttcatcttctga

SEQ ID NO: 203 - DNA, 420 bp, Homo sapiens
  Genbank Accession No. AA443923
tttttcaatgcattgtttattgagtactaactagctttgggcccaggctctgggttagcagcatgcgtgaaacaatcagaaacaatcatgagcgcctgcccacatggggcatacagtctggcagggcaagactgtagacacagaaataaatatccgattataagctgtgattagaggcatgatggaaaagagcaaggcttcctgagagaaacagggcgagcacaggaaaacctctctgagacagtgacatgaacttgaaacttgaagggtaaacaggagtgggcacccccaaaggggaaagaaggaatcttccaggcagagagaaagagaaaagacccaggcacggtatagaccagaggaaatttgaggcccccacccccccgcccccccccccccccccccccctcccccaggaaggcg

SEQ ID NO: 204 - DNA, 213 bp, Homo sapiens
  Genbank Accession No. AA446241
aggtctctgtgaggggaagcagcaggtgagggagaagggagacacaagggggagacgtggggaggcagggccaggggaaggtgacatatagacatggagtgggtcaaggaagacacatgcattcacggacctcagggccccttggcagggacaaacagatggactgactaggatgaggggaacaggacggacgtggatgcctcactcaaggcc

SEQ ID NO: 205 - DNA, 455 bp, Homo sapiens
  Genbank Accession No. AA446651
tttttcctcttaaattatttttcattctgattatattacaaagaaatgagctgtggaggtttggcactgttttccatcttaacagttgttctgtattgtaagattttatatgtgattcataatgtactactataacaagacacagtttttatatattactggaataatgcaaagaaaatgaattttcctttgggtccagtaattgtcaaaggaatgattgcagattcagaaaatgtgctttgtaataaccctgttaacataaagtatacactgaggaaaaaaataagtatggcacatatatggaaggattagttgtattagcaaggcatttcagggatggttttggttctttagactaagtaagatacatccaatttagacccccttcaaatccttagacaaatgggaatcacttggtaacataaagattattttggtgggcaggggctgatttc

SEQ ID NO: 206 - DNA, 451 bp, Homo sapiens
  Genbank Accession No. AA446661
tttccacaaaaatgtaatatacatttaatagcacattataaagttcctgaccaaagacgttgatttcctaattataatagcacagaaatcctttagaatttagtaaacgtaattaagactattcagaagtaatgaaaaaccaatatgataaaaacaaaaatcctccagtaaagaaggaacctgtccatttgagagaaatacaattgagaacttgcaaatgagacaagggaagatggcaatttggaactgcaatagaaataactatagcagaaacaaccatttaagaagttttagcagcaataagtatttattattctgaatgaaatgtacagttgacttttatataaaaatcatcaaaagtgctatattggattattttactattaatttaacccccaacagcatctattagctataactttaatgggtttttctttacttctgatacatc

SEQ ID NO: 207 - DNA, 209 bp, Homo sapiens
  Genbank Accession No. AA447522
ttaatcaacagaaaacaagtttaatgcaacaggtgacaacggtctggagcgagtccatgctccggaaggctcagtctgtggcagtcccgtggctcaagacaggctgaggccggctgcaatggaggccagcagcaggaggatggccagccacagcccaccacagctctcacccatgctcccagcatattctttgaacactgatgagttga

SEQ ID NO: 208 - DNA, 449 bp, Homo sapiens
  Genbank Accession No. AA447537
tttttgattgcactaccctttattcctaggatggaaagtgtcctgaatcacatcccgggcccctgattccatgtgtcaaggcttccagcccctcaaagcgttggaataagcatgttcaaggaggctcactgggcaggtggccaacatccctttcaaggggatacaccataaagatgacattgtccaaggtttggagggcagggtgatctggtctgaccacctcaaagcccatgtagctgaaggcccgcagcagggcacctctgtcgttccgatcattctggaagttcacaaacacagagtccacatttgtcttctcttccacgtactccagggttgcagtcaaactttcccggttgccttgatccaaggcctgatatgggatatccaggaagagtcgacggtcacagagaaggccgtgcaatgggcagaggtctgggaggtaaggcgga

SEQ ID NO: 209 - DNA, 342 bp, Homo sapiens
  Genbank Accession No. AA447707
tttttttttttttattatacaaattagtagtttatttcttcctttagtattacagttccaaaacgtaacttgaaggtcagcacaggagctgctgtgatataaaaggagagagtcacctggcgccccctgcagtcctccagttgcccagcagcagtgggacgctcagtggcacacagtgggtctctgtatggcctcccacctgcaagggcttccccgggcaggcccagctgccagaagccccggaacacacaggaagacaacactataggatggcaggtggggatctgtgcaatacaaacatgtagctagaaaacccaaccgaggatctgtctagaatacttc

SEQ ID NO: 210 - DNA, 409 bp, Homo sapiens
  Genbank Accession No. AA447977
tttcatttacaacaatgcagtcatttatttattgagtatgtgcacattatggtattattactatactgattatatttatcatgtgacttctaattagaaaatgtatccaaaagcaaaacagcagatatacaaaattaaagagacagaagatagacattaacagataaggcaacttatacattgagaatccaaatccaatacatttaaacatttgggaaatgagggggacaaatggaagccagatcaaatttgtgtaaaactattcagtatgtttcccttgcttcatgtctgagaaggctctcccttcaatggggatgacaaactccaaatgccacacaaatgttaacagaatactagattcacactggaacgggggtaaagaagaaattattttctataaaagggctcc

SEQ ID NO: 211 - DNA, 376 bp, Homo sapiens
  Genbank Accession No. AA448625
gagttatggtagtcatgagagcatctgatagctcctctgtgactcatccatttattttaatgacatctgaatatgacagtatattgaaaaaagaatgcatgttatttattccatactggggaagtgccactataacattgttttaaaaaatcttcaaaaatttcctattagaacctatcattgaattagaaaagcaagctttgccaaatgcctgattatgcctttactggtcctgctagctggcatgtttcaccaacttttccctagtgtttcctttggcactgttgagcccacactacaaaacatgaacaagtcccacaaaaccacactatgccctctgcttccccatcatgtggggaccatctgcctggacatc

SEQ ID NO: 212 - DNA, 409 bp, Homo sapiens
  Genbank Accession No. AA449749
ttttttttaggtaaaacaggatgtaaagtttatatacaagaatataatgtttatctgaaatatttacagtgttggttaaagcaatatttttacaacttttaaaggtaaactactatgtatattacaggtaagctacaatgggtttaatttgcaaaagttaagtaagaaatgttttaaacaaggcttaaagtactcaagtcaattataaaatttatatcttttgccttttacttgaagaaatcatgctatagaaatggttaatgtgcttctaataaatggaagtattgtagctggaatgtgatacatgtaacagtttaagttcccattgaaggtataaaatgatgaattgttgtaagacttagacactgagtctcagtctggagctgatgaagatgttgagataacagcc

SEQ ID NO: 213 - DNA, 112 bp, Homo sapiens
  Genbank Accession No. AA449791
gaaaggagttgagtgatttattgagtgcttacttggtgccacggcatgtagctagcgtgcttacctaaatcaaactcatgtggatccctcagcaaccaacccctgtgcagga

SEQ ID NO: 214 - DNA, 386 bp, Homo sapiens
  Genbank Accession No. AA450114
atgagttcaatatttttatttctttacaatgatttcagaagagattacaaagagattaatatacttaaagaatcagactcttgcaaacagtgacatcattaaaaagagcttattttcattaacatgtgattaacaggaaggagatgattggtgagttttcttcgtaaccaggttcactgtggataggaagggcctgccttccttcccaccatggagatcctaaaatcacaagctccagcctccatcaatgatgacagggttaccagttacataagcagattcatcagaagccaaatacacgcagagcatggctatttcttctgcagttgcgaatcttcccgtcttttgtctcttcaggaaatcattccgtgcctcttcaggatttc

SEQ ID NO: 215 - DNA, 431 bp, Homo sapiens
  Genbank Accession No. AA450127
gcgaccgctcactccccttctcctcctcctcttcctcttcagtctccaacgactctgcccccgatggtcctcgtgggttgggttgttttgggggggttgtgctgggggggagggggttcaaatatttattgtattttttgtttgtggcagcaactcaacagattctgctgctgggaagggcctcagcgttcctgaagagagatgtaggggacccactggttgttgccccggctttcttcgcagtagctggccacctccaccaagccgtggctcttccaggcgtccgtgtgagggttcgtgaccaggagacaatgcaggtctcgggcctcggtggtgccctgggtctcggccggctctcccaggagctgcgccaggcgctgcatgcccgacacccgcacgatgttgatgtcgttgtcacagcagaaggactg

SEQ ID NO: 216 - DNA, 282 bp, Homo sapiens
  Genbank Accession No. AA450324
tttctggttcatgaaatattttacttaatagccaggaatgacttatgttaaaaattgtgccgggcttataagtatctctttgatctggccaacagctcttcctctcttttctaaaaacttcaaaatgccctcatttctattttttccctttcagttaataatttagtttaaaagtgcacacttatggttcagtaaatgggctttgtctagtagtcacagatgctgagtatgaatttcaatggatccgttagctttactactaagatcttgctgagatcagag

SEQ ID NO: 217 - DNA, 147 bp, Homo sapiens
  Genbank Accession No. AA451836
tttttctgaataaataagcatcaattttattgaatcatgaataatttaagactggtacaatcatcagctttattctctatgacatggggcatgatgtccagcagatcattggcaaatccaaaaacctcatgacaaatgaaaattaaa

SEQ ID NO: 218 - DNA, 386 bp, Homo sapiens
  Genbank Accession No. AA453433
tttaaggagcaaaaggctttattgataaatatgcagatatgtctgtccacagggacctgctgtggaggccatgaccaggctgcagacctcccactgcctgggttacagccaggacatggccctgtgcagaccctgccacgacagcccagccgtccaccacccgcctcatctctgccaattgtgctgggggcagggagaggcagaggcccgcctcaggcttcccaagccctggggctcacgggtggttccctcccttccaagggagtggcactgtgcccaggggagagccaggggatgggggcagaggagggagacagcagctgcttcagaccctgagcagaaaaccagagtgagcacagctggcagcaccagatgacagatctggg

SEQ ID NO: 219 - DNA, 346 bp, Homo sapiens
  Genbank Accession No. AA453435
tttttttcacgttatgaagatattttcctttaatttatcaaacatttcacattcatgaagtcatttacttcagagcaaatgtaagcttataatattaaaaattaaagtattacaatatttacaagatggttggcaggggacacttactagtataaaaataatacaaatattgtattttcctcttatctgccagtaaaaatggcaaacagttttgtctttctgaagtttctagtcaataaccaaagatgaggagcccctaataaagtgccttgccctgtatgctccactgtctatagctttagaccctcaacattcttcttcaagttcagcagctctttttcttgcc

SEQ ID NO: 220 - DNA, 379 bp, Homo sapiens
  Genbank Accession No. AA454908
ggaggaggcccctgtgagcccactctggaacccttcctggaaccctccctactctgtccccctacagacaaccaagcactaatccccttagtaccaagaaaggggagccaggatttagtcctggcccagcccagagctgggacctggagcacgatctgttgacttccctgggtaggacactgccacctctgggctcaggtcctcatgcctccaaatggcatctagagtttgagcagccttcttggctgaggcaggcctagcctgtggagcgggctagggccaggagcatttggtgcccctccatgttgcaatgcaaacaccttcaccactggggcagtggggagagatggctatattaataaaataacgtgtgtctttc

SEQ ID NO: 221 - DNA, 426 bp, Homo sapiens
  Genbank Accession No. AA455001
tgatgcaggtctgcaggtcttctgcacccccctcaatgaggagtccctcccagaaaggaaactgatctctgggatgtcagctgctgagaggagcaagcggtagtaccaccccttagttgagggagtcagcacagtcctttctgcagcttctaacccaggaccatgaactcaggtgcctagagaagccaggcagctaaaggacaaggaatgctgggggctgtgggaacaggaatgcagataccctttgaaggagcattcctgctaaaagaagctgaaaatgtagacctatgtgaagtgctctgatttctaaatattgtgaaggttaagaaagacataaatttaggtctatgggctagatttagcccacagttgccagtttctagcgctaccaaatgaatgaataaacatgagcttgcgctcctagcc

SEQ ID NO: 222 - DNA, 256 bp, Homo sapiens
  Genbank Accession No. AA455070
ttttttttttttttttttttccagtttcaaagaaatttaattattatttacacagttaaggaacaggtgatacattttcatttgttagaaactgatctttctgtaataaaatagattttcaattcagtgtatgtcattattactgctaaggaaatcttagcccttgtctgccttaaaggaatctttatttaatttactgtaattattgctgtgtagtcactacttttgttaatttctcaaatcacttagatgatgg

SEQ ID NO: 223 - DNA, 465 bp, Homo sapiens
  Genbank Accession No. AA455381
taaagaaccaaagaatcctacaagcccccgtaacacacatacttgagttccagatactcatcaatgccatacttggacccctctcgcccaaggccggactgcttcactccaccaaaagggcactccacagaggaaattaatccttcgttgacgccaaccatgcccacttccagctgctctgccactctccagatctgggctgggtcttgagagtaaaaataacctgctaacccaacatcagctgcgttacggattgctatagcctctcctctgtatcgaacttgataactggtgccagagcgcgaaagtctcttcatgagtgcacagcatgtcctgggtgacattgcacagcagggtaggctcaaagaaattttttccaagttggtgtcgttttccacctgtcacaacggtggcacctttagaaacggcatcattcacctgtttctccaccttttctaccggttt

SEQ ID NO: 224 - DNA, 433 bp, Homo sapiens
  Genbank Accession No. AA456147
tttttttagatttttaaaaactattttaatacaagattaatagcaattttctatccaaatcagaaatgaaaaatcttaacccaaataatattcatttgacagtcacataaaattttagatttgattggtgcacacatttatcctgcatatatattatgtatatgcacagagagacctcactattatgccattgttaggggtctttttttggaagtacctcattacaaggcaatgtcaaaggttccagtaactactcaactttgaatgaagttcaaaatgtccccatgctaagctgagtctgtgccatagcaaaccatgatatagcaagtctccagaatgtgtacaaatcaatactctgtttgtataagttggtctaaaactaaacactggctaatgtctccaacaaggaggaacacattacaaatttataagt

SEQ ID NO: 225 - DNA, 355 bp, Homo sapiens
  Genbank Accession No. AA457235
aagtgcttaagatggtgtttaatacagcagggagccaagatacagtagtaggacacagtaaagaatgtggagtgtgtagatacaataaagaattcattttatgatctgccacctgttacttgacagaggagtaagttagggaaataaatgactcagttcttcatacatgcaaaggtaagttagttattacaaaagtttttgctgttgtttgtgctgaaagaaaagcatatgcatttaaacattttttaaaaaataaatcactcaataggcttaagaaaaatactttagttcatagttcattgatctgacgttttgatttaagatcaggggatgaatccaggatgaaaaccaaaga

SEQ ID NO: 226 - DNA, 354 bp, Homo sapiens
  Genbank Accession No. AA457566
ttttttttttttttttagagatcataaatacttttaatatcagataaatcattaagaaattgcattctgtacttgatgaccacacgggaaccttgctagagtcaagagaacttgtcactagtaattatgaagacacctttacggtgagcgttattaaaaccctactagaggttttgggtgggactcaagagcaaggggtggccacctgtggacgagggttccctgttgttaacagaacacgttgcccacctcgcaagtatgcagcccaatcagtccccagggtctcggttcccgttgcgcccttccccatggccactgcgctcattcatgagcctagggtgatcaggcctccgg

SEQ ID NO: 227 - DNA, 402 bp, Homo sapiens
  Genbank Accession No. AA460651
ttttttttttttattgctttctaacatcttttacttcttgaccttttgaaacatccaaaaattagtagtagtataatctatgtcacaatcataatataacagttaagaaaaaacataaaatgaaggcctaaaaagatctttgttactcatctagaattatttggtataacagtattttcccatggaggaagacttggatttcaggcattaaacaacgcagaaaaaaatctcaaggcatcacagggagagggagataacttttgactctggtttcccgtgtttcaggccaggaagagcaaggggagaaaaatatttgtccatgggaacaagtaatcatgctctaaaggacaatttcattcgaatccattcatttccttttcatgcaaaatttcaaagataaag

SEQ ID NO: 228 - DNA, 384 bp, Homo sapiens
  Genbank Accession No. AA460914
ttttttattccaatgaataataatcacactttaatataataacaaacatacaatacattaaagttagaacactactttgataagacaatcatactcaagctaagatacaaggtacagacatactgaaattgtaaagtgaccattttaatgtttgatatttacttctcttattggcacaagactaataagatagatgggttgtattactcttaaaatctaagacttctcctctagctcagggaaaatactggtggaaacctgttttacccaaaagcagctttaatatctgtttaaccaggttattctataataagaactccattttaatgcacgttatccattacaaatgtgtgagatattctataaaacacatatttaaaggtc

SEQ ID NO: 229 - DNA, 391 bp, Homo sapiens
  Genbank Accession No. AA461300
tttgttttacaaaattttatttttcaaggttgaacaatgattcattgtaggctttcagatgaaacaattagcagtcttgaagtacacattgaatacaaattaatttgatttcagtaggcacatttcttggaacaaactgaagagtacttaaaagatcccattgaatgcatgtggcattattcctagtttacggatactgtttgaactaaatgaatcttgggagagggcagttagtaattaatgcatttagaaactgatagcgctaaaatattaaaacttatgcattccaatgtttacatgtgtatgtgtgtgtgcacatgtgattctgctttgcctgttttactatcttaatgattatcccttcttactgtttcctctgaggatcttatct

SEQ ID NO: 230 - DNA, 298 bp, Homo sapiens
  Genbank Accession No. AA461453
ttttttgaccaaaaaaggcaactatatttaaagtaaatgtatgtgattcttgtcacaacaaatatttgcattttctcagcggcacgtccgggacctgggtggctccgacacgccaggcccgggaaggacccggcaccctcccctgaacttcctggctactcatttccagcgaagtttaatctatttttaataatcgttcagttttcaaggaaatggaggagctgttttttcccacggagcggcggccctgggaggggccggcccagcaggttccggccgcgatgccgtcagcgccttc

SEQ ID NO: 231 - DNA, 420 bp, Homo sapiens
  Genbank Accession No. AA463311
caccagatgaccacggcagggccgtgctgggtgagggccggggctccgatgccttcttcgacgcgctggaccacgtcatagacatacacggacacatcatcggcatgggcctgtcgcccgacaacaggtacctgtacgtgaacagccgcgcctggcccaacggtgcggtggtggccgaccccatgcagccgccaccaatcgcggaggagattgacctgctggtgttcgacctcaagaccatgcgggaggtgaggcgggctctgcgtgcgcaccgcgctacacgcccaacgacgagtgcttcttcatcttcctggacgtcagcagggacttcgtggccagcggggcggaggaccggcacggctacatctgggaccgccactacaacatctgtctggccaggctgcggcacgaggatgtggt

SEQ ID NO: 232 - DNA, 253 bp, Homo sapiens
  Genbank Accession No. AA463693
taactcccagtcaccctgttttatttcaaccatggagaaaagtacagaggaaaggctgcatatggagagactgtcgggctgacggtgtcacagcagatccgagtccacgtgtggaaacagcagccgcccggccctgggtgtttcctccaggaaaggcctggtcagtgaatgcctgcaggcagcagggtgtcaggaatcacctgcccgatgccagcgctgctcttgtctggagggccagactgtcatgaagtca

SEQ ID NO: 233 - DNA, 346 bp, Homo sapiens
  Genbank Accession No. AA463726
tcagagaaaactcaaactttattgagagaattttcaaattttcagtcacattttcaatgtgacatcagccatgtgtgtagcttcagcttgtcttctttttaacttatggctgcccatctcctgcttctttagtcttagcatgcttaggattaggtggagtcttctcttttacatcagagccatctccacgctcactccgagtcttttccagatccatttcctggcaatcaccttctactttacgttcttcgatcggaggtgttccttctctctcttgtccaggttcaatatcctgattgtcagttggtggttcctcttgctgagattcaccgggagccacgaatgc

SEQ ID NO: 234 - DNA, 315 bp, Homo sapiens
  Genbank Accession No. AA464728
cgggtaaatgaatatgtttatttaaatatgtatacaagcatggccctaggagcagcagatacactttcccaaaggtggttgcttcctttaagatattgcacaatagaaaataaactcttgtcaatccttaaaattagtcttcaatgctatgtattttagctatgtaacttgtactgtgtcaacagtgaaccttattagattcacggtgtcatcgaacttatagcaagataaaaatcaatcagtaggaatgtcattttaaaaagtaaaatagtgggacggttgtggtggctcatgcctgtaatcccagcactttgg

SEQ ID NO: 235 - DNA, 302 bp, Homo sapiens
  Genbank Accession No. AA465093
gcacaggaaataattttttttaataagagaacaatgagggtcctaaagtagaaacataagccagaagaaatctaaaaatagcttcctgatattttattttaaaatatttcatttaagctgcttttggttgcatgccctgatctgtagaagttaacaaggaaataaaatttccaagtatttaaaaaatttactcatcttccataaagcgacttttaatgtatcaacacttaaaaatacacagtgacttaatgaagtatcagcacaactgcatagaattgagctccagagaattatacactcga

SEQ ID NO: 236 - DNA, 296 bp, Homo sapiens
  Genbank Accession No. AA465394
gtttgtttgtttgtttttttgagacggggtccgctccttagcccaggctggagtgcatgctgcatgtttccatttatatgaacctcataatcgaacaaatctcatctattgtgacataagtcagaatactggtcttgtgatataaatcagaatactggtcagggagagaatctgggtcagagcacaggagggcttctaggatcctgatctgaatagtggttatatggctgtgttcaatgtaaaaattcattacgttgtacccttaaggattttgcattttgtgtgtattacacatc

SEQ ID NO: 237 - DNA, 519 bp, Homo sapiens
  Genbank Accession No. AA465491
ttttttttttttttttttttttttttttgaggtttgcagcaatgacgtttaatacttctggaatgattaggaatctgagaacagaccgtgggcggctatgctgacagggctcccggatgtggaagctgggccctgctcccttgcaggggactctgcccagctggaaggggcagcagctcggcaggccctgaccggcaagcgggcatgcaggcagcccagcagcagctgagcttccagaattgcacagcagtgggcctgtggagaggctggcgtcaactgaaggagaactggagggctgacacgcttggctggcgggcaggcaggcaatggagcagagggcacgggcctacgagagggcggggcggccagcggcaagtgggtggcccgaaggcactgttcgccgccggtgccactctgcaggctgtagtggtcgtccgcgtcactgctgctgccaacactgtccagctcaccagggccaaactccatgccctctatgtccacttcttgctctgagtcgtc

SEQ ID NO: 238 - DNA, 295 bp, Homo sapiens
  Genbank Accession No. AA476944
tattctttcaaaatatattttattagcggcacatggaatgtcaagttaagcaaattctttccagagagaaggtgagcctgacagactaaaacgttgagcacggatgatacagcagaaataacatttccagtgtaatgagagataaagaggaatactgcccaccgaggaaatgactttcttcaccatgctgaccacactgcacagcgcccgatccggctggtgaggatggggaggtgggaagaatctcaaagcactggacagggtgaggactcaggaagtcacggggtcagcccta

SEQ ID NO: 239 - DNA, 437 bp, Homo sapiens
  Genbank Accession No. AA477767
ttgttttttttgaggttatttcctctgagcagtctgcctctcccaagccccaggggacagtggggaggcaggggagggggtggctgtggtccagggaccccaggccctgattcctgtgcctggcgtctgtcctggccccgcctgtcagaagatgaacatgtatagtggctaacttaaggggagtgggtgaccctgacacttccaggcactgtgcccagggtttgggttttaaattattgactttgtacagtctgcttgtgggctctgaaagctggggtggggccagagcctgagcgtttaatttattcagtacctgtgtttgtgtgaatgcggtgtgtgcaggcatcgcagatgtggggttctttcagttcaaaagtgagatgtctggagatcatatttttttatacaggtatttcaattaaaatgtttttgtacat

SEQ ID NO: 240 - DNA, 451 bp, Homo sapiens
  Genbank Accession No. AA478778
gggtgtggtgatgtatttattcataatatattttcagaacacattaataatggagaataacacttattcatatactgaatataacttttcctggagcactctagagcttgtttggagttggagaatactgccaggcttttcctaatctctttggtctttggaagtgggcagggtttctcaaaccaagtgtcttccatgggccattggaaaggcttcccttcatcagcttggaggggcagaaagaccatggcttcagcacttccattttggaaagaagtaacaaaaaagtgaattaatgagcaatcggaaagactcaaagcattttgtactccacagttcatttcttcacacaaacgtccattactgcagcgggcatgaaaaccggcaggatgttaggctcatggcctgaagagaagtcacatcaccagccgatgttttcatgcaaaaggca

SEQ ID NO: 241 - DNA, 378 bp, Homo sapiens
  Genbank Accession No. AA478962
tttttttttttttttttggtcatactacatttcactttattattattaacatttatcatacatggttactattccaatctttcatgcagacaaaaataaacaatataaaatacataatgcactttgataattttaaccatacataaaatatggagtaatggaagctatgttacatggatattttacaaaggaaaaaaagatgacttttataataacacatccagatgaaatttatcattaaattttggatttcatatgatgttaagtatggatatattcaaaacaattactatttatagaaccaatttgatattttgtcatttaaaataatgaatactatgtaaatgagtacttataaaaatatttttaggcaaaaag

SEQ ID NO: 242 - DNA, 372 bp, Homo sapiens
  Genbank Accession No. AA479044
ttcttttttttttttttttttctcatcaaaacatgatttattaattttaagcaagagtaagcatatgtgatagtggccagcttggggatagaactcttcctggttgatgcacagttcagcacctgttgggtcttggctgttgggatgataattcttttgggtgaggggaacagccgtggtcaaggctgcctgcacccccatccaggcacaggaccctgggcaaagtctcaaaagaggtagtgtttttactttcgcaccaacaatacaacataagtattgggtacaaaagaggagatttccttcccctctacctcaacgggcaaaaggccttccatcttcagaagaggcttgtgaggaccatcggttgatgac

SEQ ID NO: 243 - DNA, 501 bp, Homo sapiens
  Genbank Accession No. AA479286
taagcgatattgagtatgaaaccctggatgagcaaaagggatcttgaccaaagggataaatgtctgataggaacctgccttaccacacacaagcagagatgtcagaatatgtcttttcaaaatatgtttttgttgttgttgttatagttttttgcattccttctacaccagagaatgaagacccagattcttagaaataaagccaaactggcattcatctggtttctcacagcatcagtttgataaaaagaatttcactgtattttttttgtccccatgtattttgctttttccaatacttccaattatttgttggtctcactaactcttcaagcctggtgtggctgtaggaacagtaagcacagtggcggtgttgataactgacgtgatgtgggctaaacagacatgttaagtcaaaactattctctggaggaccatggaatgggcatccctctagactatgggagggtgaagtggaaaactttaatgaatatagacagc

SEQ ID NO: 244 - DNA, 403 bp, Homo sapiens
  Genbank Accession No. AA481407
ttttttttttttttttttttttttttcaaagggagttttaaaaaaatttattggctatgtttgattatccacaacagaatttcccttaattagcacaggaaattgaaagttggttataatttaatatctctgctcttgtcttcaacagacatactcagcatttatacttgtaaatagaattgagtttccattgtttcgtttcctgtttttgtttccttaggaacaagaggatgaaggaaatatggtcagcattttaataacaccataaatccaagataataagtaattctataaagttttccagtttcattaattcagaatttcatcatataacttgaaatccaattggcttcctctttcttagaaacaaaaaccaaagaaacctttttctgaaagacattat

SEQ ID NO: 245 - DNA, 612 bp, Homo sapiens
  Genbank Accession No. AA485965
tttttgaaatcaaatagtagatttattggctgtctctgtaatacaatgtggtgaaaacatcttaattcaggacatcttccaccttgttttggcttccagttgtactgcaagaccagtgtcaggcacataggctgattaatcagtggacaacagaagcaaactgctgctgggttacatgtctacgtgatccattccacagttttaggaattttttttctttcatagcatcttcctcttttcaaattccttgtagatcgtggttcccagctgtgcaggagacatactgaccacaactcctgcactctgaagggcagagatcttctctttagctccaccttttcctccagcaataattgccccggcatgacccattcttctcccaggaggagcagttaaaccagcaatgaaggacactacaggcttggaatttggacctgaattatgttgcttcaaaaattctgcagcattctcttctgcattaccaccaatttcaccaatcaatatgatggcctctgtggcagaatcgttcaaaaagatttcgaggcagtcaataaaatctgttccattaaaaggatcacctccaatgccaacgcacaaagactgccccaatcc

SEQ ID NO: 246 - DNA, 230 bp, Homo sapiens
  Genbank Accession No. AA486072
ttttatggttgcattgagaactttaatggtaagccgatttttcatgtttgccagtaagctcctgtgaggggttgagacggcggaacgttaagagtgcagcgttcctcccctccttgcctctagaggatactgacttccttcctggtcacagagccctggcaaagcaaggcaaagccagagctcagaacctagagacttccttttgacaaagcagcgcctcagaagctctt

SEQ ID NO: 247 - DNA, 208 bp, Homo sapiens
  Genbank Accession No. AA488072
ttttatttttttttttttttagagtttgattgcctttattatgaatataaaatgtacatacaatacaatatacatttatacatttacagtttgcatttcctttcatcttttttgagcaaattcaattctgcatgtcccagtttgccgctccttccactgatttgcacttacactcatgacgttctcttcacttgggtactctgtgtac

SEQ ID NO: 248 - DNA, 469 bp, Homo sapiens
  Genbank Accession No. AA488432
ctgacatacggataaacttttattgacataccaaagagaaaccaatattcactgaaggctgccgaatccgtatttctaagagtaaaggtgtttaattgactctccacacttaaagcactttgtatgaaatatagctacaaatatacataaagaattcagatcacaaaactctctaggacattggctgggcgcggtggcccaagcctggtaatcccagcactttgggaggctgaggcaggcggatcacaaggtcaggagatcaagaccatcctggctaacacggtcaaaccccgtctctactaaaaatacaaaaaattagccggatgtggtggcgggcgctagtagtcccagctactcgggaggctgaggcaggagaatggcgtgaacctgggaggcagagcttgcagtgagccgagaccgcgccactgcactccagcctgggcaacagagcaagattctgtctcaaaaa

SEQ ID NO: 249 - DNA, 231 bp, Homo sapiens
  Genbank Accession No. AA490341
ttttttttttttttttttttttaggaaagacccttttattggggtggacacggagcacgcactagtccatgataaaaataaaatgactcaagagaaagatcgcaagggccgacttctccccaacgtgcgtgcacgctgagtgaggtctgggcatgggaaagttccgggcgacggtgggacaagaccgagtctcaatggcctggatcggtgttgggggggagaaggccactc

SEQ ID NO: 250 - DNA, 505 bp, Homo sapiens
  Genbank Accession No. AA490667
ttttttttgggagtgctaactggattttttatttttatatcaagacactgtgtttaaaatttttacaaaggacaaactccatgggtttccgttagtgttttaagaacttttctttaaaaaaaaaaaaaaaccaacaacaacaaaaaacaccgcctttttgaaagagaaatgacagacacaaaagactgtaaagaaaatggggcgaatttctgatagcatttccccaagggcagaggcaaaacccagatcagacctgggggcccaatagtgatgtggcttccatagtacgttgttcaccaaatctaaggtcacctggtctggccaggccaatgctgttggcctttggggaagcaggtcaccctgcaggctctgcagccctccacacggacacagagagagttggagatctctcccctacgaccctccagctccatccagtgctagcccctttctccttccaccccatggtcttgcttaaatctgtttccttcctgggggtcttgtt

SEQ ID NO: 251 - DNA, 407 bp, Homo sapiens
  Genbank Accession No. AA495865
taatctccatgaaatcgtgaaataagacaagaatagtgtttcagctgtaggccattttacagctaattgcccataaattgtagcatttattgacctgaagtactaagctaattgtcttgactactcaaagcccctgaattgttgtcaactttcccctttgtgttgtgtagccctaacgtcatttagcttgttgtctgatgcctccagtaggacacctccgatggagctttgatttctgagcagcgaaactcccttcctaagatgcatctcgcataggctgcctatgatgaaggaccgtgcacctccactccaacagagtgctgagtttaaaagttgacctgtgtttgtaatttcactttcatcttgcttaataaatatctgctggattctttcattcaaaaaaaaaa

SEQ ID NO: 252 - DNA, 520 bp, Homo sapiens
  Genbank Accession No. AA496247
ttttttaatcaacaactttaatgtaagagcaagagtgagtaatggaaatccagctctggtagtagagagcatctacttgtggcagccaaagatttctttgcagtaacttttagctaggtttagggataaaaagaagaatgagatgaacacattacaatatgatgtaaaccactggtatggttttcacaaaagtggaaaagatttaatcagtgaataaatgctacaaatttgccaatcgatttttaacttcccctaaatttatatttcgataagcaatctctaagatttcaactctacaatatttgatgcacaaaaacacagaaaaatgttttaagggaagaataaattattttaagttagtcagactgttaagatatatttaaaaacctgtattccagaacaaaagtcacagatgactaacagaaaaaaaagaacgcacctatatctgggtaaacaaagctatgtaatacacaattacaataaattattatggtataactttggatactgttatatattt

SEQ ID NO: 253 - DNA, 406 bp, Homo sapiens
  Genbank Accession No. AA504805
ttttttttttttttactattaaaaatgtattttccaaaagcaaggtagttgctgtcccaaaaagccgaaagcctctagtccctgcggaacgggctggatggggcttcagtctgacacagccaggcggggcagccctcggcgagctacggattctctgggagatttgatagagctccatcgttgccctcgcatcttccaccgagctgtgtccaagcaggctgttctggatgctcttgtgcaggaggcgctcactcagcacccgcaggagacacgcctgcagtggtccagcttggcctcacgccacaacagcctgtcagtggacgtgtcgtagattgtgtagccgctcatgtcctctttcagtgcctggaagtcgtgcttcaggtcatgacccaccaccagcttgcct

SEQ ID NO: 254 - DNA, 423 bp, Homo sapiens
  Genbank Accession No. AA505136
tttttttttgtattgcaaaatgtacagcatttattcacatacagacaaaaaggcacaattctactaaatagttcaacaaaaaaatacagctgtcctcaactagttttataaatactttcaaaaagggggtagaaataaatacaggattgggtcatgtaatataaaatagtcatctctacatatactttgatttttaactcttcatgcacctttttttttttcaattttagctgaatggacaccaagctaggcacatagtgaaaaatcctctgtacaaggttacaaatgtaatgacaagtttgtccatttcaaaataagatttgtacacaacacataaaacccttcatttagatcttgtgtttataacctaacaaatgacattccaggcaactttacaaaagtttaactagcctacattttgac

SEQ ID NO: 255 - DNA, 395 bp, Homo sapiens
  Genbank Accession No. AA598695
atttcaacttttattaaaccaaatccagtaacttttacaatgccttactagagggttgcctcataactgaaccttcatttctggcagggaagaaaccatggcttcaggatcatgactgaagtttggccatgttccatcattaatgttccaacatcaccagggacacaaagctcagcatgagggcttctacccaaatctccctacgacaggtacttcttcaactcttccaccacctcttgaggctcagggaatttgagtttgcgtgggggccccttcttaatcccagtccagagctccgcactgctgccgtccgggcgcacagcgtcacctcgaagctgcccctccgcgttaacgtcgggttcacctttactggaagctctggggcctccagggca

SEQ ID NO: 256 - DNA, 369 bp, Homo sapiens
  Genbank Accession No. AA598939
tttttttttttttttaattagattgcattttatttagataaatgaaaatttgccccaaacagaactaggaatcaaatattgtcttggactagaggtaattgctaagctggaagcttatattgaaaactaaaatttccagcccttgactatctgtagttccaaacatcaaaggaaaatattggaacaatttatctatgtacagagagaggcaactcatgggtaccataagcaaaataacctgagggggaacatttgatattacaagaagtggtgagagtttacaagtcttgcattgctttctattgtacatggctctgtagtaatgccaaaaataacaaaatgtaggcacttgctctggacttctgcagt

SEQ ID NO: 257 - DNA, 408 bp, Homo sapiens
  Genbank Accession No. AA598982
ttcattttgcaaatttaatgtaactctgataccaaaatatgacagcacacagaaagcaaacaataaagcaggaacagcaaacagatttttccatcacatgacaccctcagctgattggccataactgccttgactgctgtgtggacaaagattccaaggatgtactttggctccatgggaaggactactgcaatttattagcggtatctgtaaacatggggaataaatctgaaacctcactagccatacgagaagccacaggcaccaagactggcggctccactgccaaagccagcactggtgctcggtccaccaccaaagccagcaccagtgtttggtccaccgccgaagccagctcctgtgctcggtccaccgctgaagccactggtgcttggtccactgcagaag

SEQ ID NO: 258 - DNA, 346 bp, Homo sapiens
  Genbank Accession No. AA598991
catcacgacttcaggtttattagtgatatgcgcgaagtcttcctacgggtagctgcatgcaacacacggcactcctcgaatacagtcatcctaaagctttagttactgcgtggtaaggcttcttaagtcacagtgtattcttcaaggcctgggccaaaaaaagagacttcgagacaagatgacgtcagattacatggatcgctaatgaaccgagctggactagatccgacttgatctacacacatgccactactgctcagggccactgcgccacgctggccaaggggtctgcactcacggctggctgctttaggtgcggccaaggtcgcgttttctagagtgggtt

SEQ ID NO: 259 - DNA, 428 bp, Homo sapiens
  Genbank Accession No. AA599120
aaaccaaaaaacattttttcattaaaaaaagtatttagaacacacaaaacaaggcaacacttattcttttttctcatcttctggtatgggatctgttggtggctcctccactgttgcactgttgctctccgagccagtgttactatcactggttccttcctctgccatactgtcgaccccctcctgcccactctccttgtcctcaggagtagacgtgccttcttcaccattctgttggctctctgttgtttcttcaaggtgtgtctcctctgtctccatcggaatgttctcgtcgtctttcttctcctcgcctttgttagctgcttgttcttcctcaggaacgatgctgctctgactgcgctcagcttgctctgcggcctccttctccctttcctcctgccttttgcgggcctgttcctctgcctgtg

SEQ ID NO: 260 - DNA, 546 bp, Homo sapiens
  Genbank Accession No. AA599216
tttttttttttttagaaacctagagaaaaaaattttatttaaagacacattttaagtaaaatgaagaacattttacttatttttatgtccagtacagtcaaagcagccacattgcataaccccgggggacccccttcctctttgtgatgccccagaacaatattgatttgattatagaaagccaccggcagcctacatgcgcaacggtgagttgttggttatatacactgtggaccatacagtggaatattacagtcaataaaaggtatttttagagagaaaaaaaaacattggaacacgcttatgatataatgttaggcaaaatcgctgttatgaacagctcgtttggggcagagcaaatcctgggaagtaacgctgaggctgttggtgcaggcagtggagtacaacatcttcgagggtatggagtgccacggctccccactagtggtcatcagccagggcaagatcgtctttgaagacggaaacatcaacgtcaacaagggcatgggccgcttcattccgcggaaaggcgttccggagcacctg

SEQ ID NO: 261 - DNA, 324 bp, Homo sapiens
  Genbank Accession No. AA599331
gactgtgaggaatttttattttcctttcatgttcactaattgcaagctttcttcatttcggtaatatctaaaatgatctcctcttgtcggaggtagattttcccagtagcttctaactcctgacccagaagcggtgtattgcgcctcagcatggaggaggacgtgaaggcgtacggagtctgggagtagtacaccacgtaggtaggtttgtactggtttggctttgtgtactgtgttccccaggcaattcgaatccagactgcattctcctcagtttctctgaagctgactgtcacattttttaatgctctctgaagaattttc

SEQ ID NO: 262 - DNA, 271 bp, Homo sapiens
  Genbank Accession No. AA599365
tcacatgatagttttaatatttatttagcagaggggtaaattgaaacatcagttctctagaccagtcaggaaatgtatgctttgtgctttataagcttacattcaacatagatgacataagttaccatactcaaatgtaagatagggagaggtagaagaaatagctgagaacttgaaaagatgtactgttattgtcaacaaaccaatgtcttctcccttcataaaattgtgtttagggaatattaacaattaagcttgtatacaatagtaa

SEQ ID NO: 263 - DNA, 317 bp, Homo sapiens
  Genbank Accession No. AA599522
ttttttttttttttttttttttttttttttttttttttttaaaaaataaggagggagctttatttaatatgaaggttgaggcagggccggggcgggagggcgctgtcacttggtgatggtgttcgcgttcatgctcttgccgctgccgctgagcacgatgtagggggtcttctgagccttctgcttctcctggagcagggccacggtgcccaggggcgtgtcgctggagctcatcttcttcaggagcgcctcctcgtccagcttcttcatccgccgctctgtcttcatcttgcctgagcccttgccatggaagcggt

SEQ ID NO: 264 - DNA, 226 bp, Homo sapiens
  Genbank Accession No. AA599661
gaaccatttttctgttctcttatttattgacagtttcttttaattacaacacaatgaattgatggtaaatacagaagatgcaatagtataaaaagccatttaacccttccctaggttaagacacttacagcagacaaaaactgccccacccctaatcccctccttgaatggaaacaaaataaatataaattaataaatacaaaacaaatcactgcacagcccttaa

SEQ ID NO: 265 - DNA, 273 bp, Homo sapiens
  Genbank Accession No. AA599662
tttactctaagaatttgtcttatttttaatgcatggaaaatagcaaaattatcatgccaacatgaggaatatatactataattcataaatgcctaattatcaaaataatgacatagtcatggttagatgcaacctagaaatcttatataagatgcaactacatattgtatgatcattcctcttatatatgacattcaatcctcatcaaattcagctatgaataaatggcattatgaaataaacacttaatatcacaatagggtcatagtctgc

SEQ ID NO: 266 - DNA, 281 bp, Homo sapiens
  Genbank Accession No. AA609006
tttttttttttttggcctgtatctcataattatttttatttagaggaatttggtagtggcggggttggggtgggaggtggtgtgtggacggtgtgaattgacagaaacaatttccctacaccaaaatacaggtatgttttcattctctatgcccctaaacaccctccctgcagctatgcaacgagcaattcacgggaagaggcttctttacatagacccctgtttttggtgttttgatttacttttgtgtatagagttgatctgtccctcttcccattggt

SEQ ID NO: 267 - DNA, 467 bp, Homo sapiens
  Genbank Accession No. AA609027
ttttgaacatgtagctcactttattttccccaaagatgtcttgaaattttaatcagttcagtcatccctatctttcttcttacatattaatcctatagattagtgactcttgtataagacaagaaaaactaatgtgcttgtttgatatcagcacagatcagtctctaagcagaagtgaaaatatgggaaaatgagttggaaaggaaaatgttatagaaaatagtaaagacaaaccatgggaccaccttttctcagtgagagatacattgtcgggggcagagtgctggagagctgggcagagaggaacaaaatgtctgacagcaggagccggagcccagggaggaaaccagatggaaagggctctgctcagactgactcaatgtgggcacatatgggataaaggacatcacagagaactcaggaacagaaaccacactgaaatagagggatggggagacatgctgggc

SEQ ID NO: 268 - DNA, 399 bp, Homo sapiens
  Genbank Accession No. AA609309
tttcctcactgatagctgatcacattaaacaggtacaggtgctaagaaagtttaagactgatattttggcaatgacagtttaggttaactctgtttggaattcctaaaaataaaaagaaatcccttaaaaaaggctgacaaactgaccacttggccttgaatcgactgttagggtcacacctgccaatgccaggggacatcacaaaaaaatagagaatgccaagataaaaagttcactgcattcaatttggcctaatttcttgataatagtttcctattagattttccgattaatactgatggctcttacctaggctgtgataattaggttttgatctattgtgacattaatgatcacaatcagttgactttgaaattgtcttaattaatggctctttc

SEQ ID NO: 269 - DNA, 387 bp, Homo sapiens
  Genbank Accession No. AA609312
ttttgggtttgtttcttttaatcacaagaagtctctctgtgggtgctgagctcaccgtgccgcaacgtcatggttatgggtggctggtccccagtcagtctcgtgtggcagtcgggaccttctacttccttgccttcgctttctttcctttgctcgctctttggggcttcagggcttcctcctggcctgcgtggctggtgatggggggcgggataggggtgggggcgttgaggttcagagtcttcttctgaagcttcaggtccaagatggcgaatgtgttctggatctggcgctgcagcagctcctgcaggagctccatctgggtgtggactgcctggcagatgaggctctccaactcctgtctctccaggacctggccgggctgcg

SEQ ID NO: 270 - DNA, 353 bp, Homo sapiens
  Genbank Accession No. AA609504
gttgttttttttttcttttaaaataagactttactgaatatatcaacaaggtactgtatagtgtagagtgaagtttgtcattaacaaagtgtgcgacatggtaggtctcagaggatgtgtgatgcagaatctttcagccccttatcagagagaacacactaaacagaaaccagaagcaaatcagcatatggttcaaacaataacaaatcatcaggttaactttcagtgaatatacactagtcctatgagcgacacacacttggcaatgccttcaccttgccttaaacattataaatcttacattccagggacacctttacaaatgcccctgtttgtgtgtgtgtgtgtgtgtg

SEQ ID NO: 271 - DNA, 424 bp, Homo sapiens
  Genbank Accession No. AA609645
tttttattgttacagaaccattaaatacaacttatacacaagcaagctgggcggcgtccggggggcagggagagtgcaagagggtcaggggtgagcagtccgggcccggtcctggagggggctgaggctgccgtcgtgggaggggcttggctggcggaggcgggctgcctgtggaggccttgaagctttgccagcagctcctggatgaagtcctcgacaggtttcccacatgacttcaggagtccctggattttccggcttctctcctcttcactctctaactccaacaattcatcaatgttgatctcatcgggcatgtctgcctccatgccgcggtacagctcctccaggcgcccgtcgatccacttctccacgtccagccgccgctgcagctcccgccggtcatacttgacggtgacgcgcg

SEQ ID NO: 272 - DNA, 377 bp, Homo sapiens
  Genbank Accession No. AA609943
ttttttttaaatttaacactttcaaactttattatcagtacagtcaaagcaatacaaagttatatggaactaaattaatctagaaagtagatttttatatcattcaagataaggagaagcccagattaaatatataaaattgttgttatttacacagctaacttcccgctttgaaaacaatcccatacgtaaatttcttttttggagcaaggtaacttggtgattgttctatctctacccagaattcacccctatttggaaaactgggggctaaaagcaatcagaattcaccagttcaaaaacacttacgtccatcttattagcaacactaactacccagaggaaactaaaatagaccagatttacagcagtaagta

SEQ ID NO: 273 - DNA, 487 bp, Homo sapiens
  Genbank Accession No. AA620289
tttttttttttttttgttaagacaggaaacacatttattgagagcacagtggggtgcgccaagccctgtgctttggaaccgcatcacagcgcccctcacaacagccctgtgaggtaggtgaaggagcccacttcccacatgcagacactgaaggctcaacagctcccctaggcctcagggttcctgcggggtgggcaggggtccagcccacgggtctgaccccaggtcagcggcgtccatcagtcagagggcgggtctctactcaaggggaggccccgggtccagagtctctgggtccagcctgtcccgtgggaataggtgcagggtgtccccgtggctgtggagggatttcgagctggagaggggctggggtccacattcgaggtcccttcccacgtaggcatccaggtgatggcttccgccaaaccaggaaggagacgagaggcccgccaggaagaagacttgggtccgggatggtgggcccatc

SEQ ID NO: 274 - DNA, 303 bp, Homo sapiens
  Genbank Accession No. AA620461
aatgttgcataacaatgtttatttagttttacatttgtttacaatttcttataaacacttcattataattgttttatacaaacaacagtttaaatttacttatgtttatcatttatttgcttactagtttttcaatttcagataatccttttagaatcatttcccttcttgaagatcatccttttgtagtctctttactgaagttgtgctgaggataacatctgtttttcatctgagcatctgtttgtttcagtttcgcttgttgcaaattctaagctaatagtttttctcagaattctaccc

SEQ ID NO: 275 - DNA, 277 bp, Homo sapiens
  Genbank Accession No. AA620825
caaaaagacttatttacaagttgagcatgtcatctcaattcatagcatgtagaaaaagctaaaaatgttttggagatataaatttggctggacgactcacctacagtatattcagggatgtcttctgtacagaatatatacaggttgggactggcaagggaaatcctatctcaggaaggcgatgaacaccaccacagagccacagacccttagcaatgttccctggctttcatttgcagttggccttgtctctggacagagtttgatgtgctgggac

SEQ ID NO: 276 - DNA, 464 bp, Homo sapiens
  Genbank Accession No. AA621367
tttctagttcttgactttaatgcccttggagtgtactgaggctcaatacaccaaagcactcacagacaggtacatgaactcacacaggaagtgttatagtgtgtacataaacccaacaccatacagaaggaagacgacggacccaggtgacaaaacttctcgggacttcctggtcaagccctagctatcagcctcaaggaaagactaccatgccttgaggaaaggccaggtgagcgctggctggagtgcctgcaggccgcaagccctgagcccaaccctgaggtgcagtcagggagattggagctacacctctgtcccctgggagctgtgcctcaggatgctgttctcacctcggcagattctggggcagtcagcagccccttcagggatcttactcccagagccaccaagcaaggtggacatcctccctgatgggactctcgcctaccggggctactcaccac

SEQ ID NO: 277 - DNA, 361 bp, Homo sapiens
  Genbank Accession No. AA621634
tttttgggctttgcaaaattttaatatattaaaataagaggcatctgttagaaaacattctattgtataaaacccgagttcttaaaaacatgttttctttggcactttcattccctccctcccctttccccagcatattgcaaaaagctctccagtgctaaggcattggcagggtgtgtaaacagcagccagcatatgtggaagaataatacaaagcttttttttttcttctaatatgtctgtgcagcaagcataaataacaggacccattccaaggagtgtgtgtgggttttccccctcccctgtgtcctctgtcaccttggtgatgaggccagagtgatgtgaagactgggagggaacc

SEQ ID NO: 278 - DNA, 372 bp, Homo sapiens
  Genbank Accession No. AA621695
tttttttttttttttttttttttttttttttttttagggtctacccataaagctctttattggcctccagggccctggtccagccccactgtggggtcacatggaaacccaggctggggagccgcctcttgtctcacaaaagtccacgtcctccgggaaaacggcaagccctcggcgtgggggtcagcgatgccgggccctccatgctacaacctcttgttcttgctcagccggttgtggcgccagatgttctgtttccgcagccgccgccagtactcccggctctcggggtccagctcctccagggtctttgggggaccaagttcatctcaaacagccattcagggtactcagcatccggtttcaggggta

SEQ ID NO: 279 - DNA, 1201 bp, Homo sapiens
  Genbank Accession No. AB000584
agtcccagctcagagccgcaacctgcacagccatgcccgggcaagaactcaggacgctgaatggctctcagatgctcctggtgttgctggtgctctcgtggctgccgcatgggggcgccctgtctctggccgaggcgagccgcgcaagtttcccgggaccctcagagttgcacaccgaagactccagattccgagagttgcggaaacgctacgaggacctgctaaccaggctgcgggccaaccagagctgggaagattcgaacaccgacctcgtcccggcccctgcagtccggatactcacgccagaagtgcggctgggatccggcggccacctgcacctgcgtatctctcgggccgcccttcccgaggggctccccgaggcctcccgccttcaccgggctctgttccggctgtccccgacggcgtcaaggtcgtgggacgtgacacgacctctgcggcgtcagctcagccttgcaagaccccaggcgcccgcgctgcacctgcgactgtcgccgccgccgtcgcagtcggaccaactgctggcagaatcttcgtccgcacggccccagctggagttgcacttgcggccgcaagccgccagggggcgccgcagagcgcgtgcgcgcaacggggaccactgtccgctcgggcccgggcgttgctgccgtctgcacacggtccgcgcgtcgctggaagacctgggctgggccgattgggtgctgtcgccacgggaggtgcaagtgaccatgtgcatcggcgcgtgcccgagccagttccgggcggcaaacatgcacgcgcagatcaagacgagcctgcaccgcctgaagcccgacacggtgccagcgccctgctgcgtgcccgccagctacaatcccatggtgctcattcaaaagaccgacaccggggtgtcgctccagacctatgatgacttgttagccaaagactgccactgcatatgagcagtcctggtccttccactgtgcacctgcgcgggggaggcgacctcagttgtcctgccctgtggaatgggctcaaggttcctgagacacccgattcctgcccaaacagctgtatttatataagtctgttatttattattaatttattggggtgaccttcttggggactcgggggctggtctgatggaactgtgtatttatttaaaactctggtgataaaaataaagctgtctgaactgttc

SEQ ID NO: 280 - DNA, 6289 bp, Homo sapiens
  Genbank Accession No. AB002335
acgacctatggtctagtaggggttctgggggctggggcgtgtaccgctcccctagctttggagctggggaagggctcctgcggtcccaggctcgaacccgtgccaaaggacctggaggcacctctagggcattgagggatggaggatttgagcctgaaagagtcgacagcggaagtccctgtcaaatccagatatcgcctcagagaccctgacgcttctcagtttcctgcgctcagacctttcagagctgagggtccgaaaacctggtgggagctccggggaccgtggaagcaaccccctagatggcagagactcaccatccgcaggtggccctgtggggcaacttgaacccatacccatcccagccccagcatcacctggcacgcgccccacactcaaggacttgacagccactctgcggagagcaaagtcattcacctgctctgagaagcccatggcccgccgcctgccccgcaccagtgctctgaagtccagctcctccgagctcctgctcacaggccctggtgccgaggaggatccgctgcccctcatcgtccaggaccaatatgtgcaggaggcccgccaggtttttgagaagatccagcgcatgggtgcccaacaagatgatggaagcgatgccccccctggaagccctgactgggcaggggatgtgacccgagggcagcggtcccaggaggagctctcaggccctgagtccagtctgacagatgaaggcattggggcagaccctgagcctcctgttgcagcattttgcggcctgggtaccacagggatgtggcgacctctttcctcatcctcggcccagacgaaccaccatggccctgggactgaggacagtctgggcgggtgggccctggtgtcgcctgagacccctcccacaccaggtgccctccgccgacgacgcaaagtcccaccttcaggttctggtgggagcgaatttagcaatggggaggcaggggaggcctacaggtccctgagtgacccaattcctcagcgccaccgggctgccacctctgaagagcctactgggttctctgtggacagcaacctcctgggctcactgagccccaagacagggctccctgccacctcagccatggatgagggcttgaccagtggtcacagtgactggtctgtgggcagtgaagagagcaagggatatcaggaggttattcagagcatagttcaggggcctggcaccctggggcgtgtggtggacgacaggattgctggcaaagcccccaagaagaaatccctgagtgaccccagccgccgtggggagctggctgggcctggattcgagggccctggaggggagcccatccgagaagttgagcccatgctgcctccatccagcagcgagcccatccttgtagagcagcgggcagagccagaagaacctggtgccaccaggagccgggcacagtctgaaagggccctacctgaggctctgcctccccctgccactgcccaccgaaactttcaccttgaccccaagctggctgacattctgtccccgaggctaatccgccgaggctccaagaagcgcccagctcggagtagtcaccaggagcttcggagagacgagggcagtcaggaccagactggcagcctgtctcgggcccggccctcctccagacacgttcgccatgccagtgtgcccgccacatttatgcctattgtggtgcctgagccaccaacttctgttggtccccctgtggctgtgccagaacccataggcttccctacccgagcccatcccacgttgcaggcaccatcgctcgaggacgtcaccaagcagtacatgctgaacctgcactccggtgaggtccctgccccagtgccagtggacatgccctgcttgcctctggctgcaccgccctctgctgaggccaagccccctgaggcagctcggcctgcagatgagcctacccctgccagcaagtgctgcagcaagccacaggtggacatgcggaagcacgtggccatgaccctgctggacacagagcagtcgtatgtggagtcgctgcgcaccctgatgcagggctacatgcagccgctgaagcagccagagaactccgtgctctgtgacccttcactggtggacgagatcttcgaccagatccccgagctcctggagcaccacgagcaattcctggagcaggttcggcactgcatgcagacctggcatgcccagcagaaggtgggagccctgctcgtccagtcgttctccaaggatgtcctagtaaacatctattctgcctatatcgataacttcctcaatgcaaaggatgctgtgcgtgtggccaaggaggcgaggcctgcctttctcaagttcctagagcaaagcatgcgtgagaacaaggagaagcaggcgctgtctgacctcatgatcaagcctgtgcagcggatcccacgctacgagcttctggtgaaggacctcctgaagcatacacctgaggaccacccggaccatccactcctgctggaggcgcagcggaacatcaagcaggtggctgagcgcatcaacaagggtgtgcggagtgccgaggaggcggagcgccatgcccgtgtgctgcaggagatagaggctcacatcgagggcatggaggatctccaggcccctctgcggcggttcctgagacaggagatggtcattgaagtgaaggcgatcggtggcaagaaggaccggtctctcttcctgttcacggacctcatcgtctgcaccactctgaagcgaaagtcaggctccctgcggcgcagctccatgagcctgtacacggcagccagtgtcattgacacagccagcaagtacaagatgctgtggaagctgccgctggaagacgcagacatcatcaaaggggcatcccaagccaccaatcgggagaacatccagaaggccatcagccgccttgatgaggacctcaccaccctgggccaaatgagcaagctctctgagagccttggtttcccccaccagagcctggacgatgcactgcgggacctctcagctgccatgcaccgggacctgtcggagaagcaggcgctgtgctacgcgctttccttcccgccaaccaagctggagctgtgcgccactcggcccgagggcaccgactcctacatttttgagttccctcaccctgacgcccgccttggttttgaacaggccttcgatgaggccaagaggaagctggcatccagcaaaagctgtctagaccctgagttcctgaaggccatccccatcatgaaaacccgcagtggcatgcagttctcctgtgcggctcccaccctgaacagctgcccggagccctcgcctgaggtatgggtctgcaacagcgacggctacgtgggccaggtgtgcctgctgagcctgcgcgccgagccggacgtggaggcctgcatcgccgtctgttccgcccgcatcctctgcatcggggcggtgcccgggctgcagcctcgctgccaccgggagcctcctccgtcgctgaggagtcctccagagacggcaccggagcccgccgggccggagctggacgtcgaggccgctgcagacgaggaagccgcgacgctcgcggagccggggccgcagccctgccttcacatctccattgcaggctcgggcttggagatgacgccgggcctcggcgagggtgacccccgcccagagctggtgccctttgacagtgactctgacgatgagtcttcgcccagcccctcggggacgctgcagagccaggccagccggtccaccatctcctccagctttggcaatgaggagaccccgagttccaaggaggccacggcagagaccaccagctcagaggaggagcaggagccaggcttcctgccactgtctggctcctttgggcctggtggtccctgcggcaccagcccaatggatgggagagcccttcgccgctccagccacggctccttcacccggggcagccttgaggacctgctgagtgtcgaccctgaggcctaccagagctccgtgtggctgggcactgaggatggctgtgtccacgtgtaccagtcctccgacagcatccgtgaccgcaggaacagcatgaagctccagcatgcggcctctgtgacctgcatcttgtatctgaataaccaggtgtttgtgtctctggccaatggagagcttgtggtctaccaaagggaagcaggccatttctgggacccccagaacttcaaatcagtgaccttgggcacccaggggagccccatcaccaagatggtatctgtgggtgggcggctgtggtgtggctgccagaaccgagtccttgtcctgagccctgacacgctgcagctggagcacatgttttacgtgggtcaggattcaagccgctgcgtggcttgcatggtggactccagcctgggtgtgtgggtgacattgaaaggtagtgcccacgtgtgtctctaccatccagacacctttgagcagctggcagaagtagacgtcactcctcccgtgcacaggatgctggcaggctcggatgccatcatccggcagcacaaggctgcctgtctgcgaatcacagcgctgctggtgtgtgaggagctgctgtgggtgggcaccagtgctggtgtcgtcctcaccatgcccacttcgcccggtactgtcagctgcccacgggcaccactcagtcccacaggcctcggccagggacacaccggccacgtccgcttcttggctgcagtccagctgccagatggcttcaacctgctctgcccaaccccaccacctcccccagacacaggccccgagaagctgccatcactggagcaccgggactccccttggcaccgaggccccgcccctgccaggcctaaaatgctggttatcagtggaggtgatggctatgaggacttccgactcagcagtgggggcggcagcagcagtgagactgtgggtcgagacgacagcacaaaccacctcctcctgtggagggtgtgaccctgtctgccgtggcccaggactcgcccgcccacctgccttcagcctgcttgcctctccctagcccacacgcagactttgaccaggagtatccagccaggggcacacatgtgcctgcgtgggctctgccttgtcttcgcggaagcattcctgatggaacacccactggccagccaggccatggcttctcccgaccctctggctgccccggtgcttccagtcatgatcgggtgggggacatgtgggctgaccaggacctctgaccctggagcttctaccaaagacacagctgggtctggaccccacggggctggggagggccatgtgcaatatttggagggttttctggagggcagcaggaaggctggggaattccccatgtacagtatttatgtttctttttagatgtgtaccttcccaagcacttatttatgcagtgacctggtcacctggggtgggggtgatttgaggaaatgacatgaggaaaagaaacctattcctgccctggggaccaccctgggactctaaccaagccttcctggagggacccatgcgcccctgagccccattccattcatacagacacacacgtacgcacactgcatgtccaaggccctaaacattgcccgttgacataaactttccagggccccagcctgatggggctgccctcagtcctctagatcaagatgctgactattagggggcagtgattgccatctggggacctgtcaggctttgtcatttcccagtttgttggtggtgcctttagtggttccctaatttgggaacactgatggggccttggacagggctttctctcaggtaggagaaatgggcccatgatctcctcacagtcgcccccagtccttggccctgcttccctgtgtctcatgcactggcacatatggtcaccttggagggcagacctaggagcccctctgaccactgaatccgtctccacaccccttctgccaagggaagccccttcaggaaggaccccccaaagctgaggggctgaatgtagccttttcaacagagaaggctcccacttgagagcagcctctacctgaccccctggaccacagagagccactctgaccctcagccccctcgcttcttcagctaaaactccaaaggtttggtttcagatggggtttgttttgttctgtttggttttggttttgtttggggtgggtgggtcattgcggtcttagattatgtttctcttgctaccaaacagtcatgtattaactctctttggatgatgaagtttaaagagtcaataaatagaaacaccag

SEQ ID NO: 281 - DNA, 6824 bp, Homo sapiens
  Genbank Accession No. AB002340
cttgtgctaacaatttatgaagcaaaaggcttagaatttgatgatgtcctcctttacaacttttttactgattctgagggatgcccaagttggagcaagctctaaggagagccttacagatgaagccaaggttagcaatgtccaccctgtgatgacagaactgggtaaggtcagttcatagatagagacaattccaggaagacaaatgaggcttggttcctgccctctggatcaggtaatgtgggggacaagaacagcttccttgcatgagagacccctctagcatggcttcactaccactgcttgcagctcatgcagatgatggcagccaaagagtccccacattgacccccagtgacctctgtattggtccactgctttcacttggctcctgagtccttgtgggtttttctccccaagcttagttcattatgggtagagctaccaactcacagccgttgtcctgggttttctagccactgttttctctttcccactatcttttggtggagactcaagctggctgctgactgtactgtggggtcttctctggggacttagctggctgtgtcccagtccttgttgcagacttcctttgcacatgatgcatgcttgaaggggctatgttatacccaagtcaagagcactgttggctttaacactttaaaaatctgccccagaactgaccctttagatagagtccttcctttttttcttatcattttttaaatgttattttgccttaatagcacaactattacaatattgatataggtgctttgcagtttacagagtactttttgaagtcattgtctcactccaccaaccctctgaggttatatgtatttttattactctcattctattttttaaaatttatttttatttttatagagatatggtcttgctgtgttgcccaggctggtctcaaactcctggccttaagtaatcttcctgccttggcctcccgaagtgctgagattataagcatgagccacctttatctgtagataaagcagaaggtcactgagattagtacatttctcatagtcgtaatgtagatggcagagcctggagatgaactcagatgctttgagttctaaatctctttccattttccttccttttaaagcctcgcatgcgaattgaattccagaaccttccacaattagtgtatcattgctgttccttatgtacattcctttcctgttaaattttgctaataaaatcagatgcacactcattaaccctggaaccatttttacctctgaggactaacttttttttctaatgatacatccatcggtcatggttggactgaggctctcctaaaagaggaagggcttataaggaatggaagatcatttcctcattcacacctacctcaactgactccagagaggaaaaccggccattggttgaagtacccctggacaaaccaggctcttctcagggtcgatctctcatggtgaatccagaaatgtacaagctcctcaacggagagctgaagcagctgtacaccgccatcacacgggctcgggtcaacctctggatctttgatgaaaaccgagagaaacgggctcccgcattcaaatatttcattagaagagattttgtccaagttgtaaagacagatgaaaataaagactttgatgatagcatgttcgttaagacctcaactcctgcggagtggattgcacagggagattactacgccaagcaccagtgctggaaggttgcagccaagtgttaccagaaaggaggtgcatttgagaaggagaagttggccctggcccatgacactgccctgagcatgaaatccaagaaagtcagccccaaggaaaagcagttggaatatttggaattggctaagacctatttggagtgcaaagagccaacactgtcccttaagtgtctgagctatgccaaggagttccagctctctgcccagctgtgcgagaggctgggaaagataagagatgctgcctatttctataagcgaagccagtgctacaaagacgctttcagatgctttgagcagattcaggaatttgatctagcactcaaaatgtactgccaagaggagctttttgaagaagctgctattgcagtggaaaagtatgaagaaatgctaaagactaagacccttcccatttccaagctctcctattctgccagtcagttttacttggaagctgcagcaaagtatctgagtgcaaataagatgaaggaaatgatggctgtcctctcaaagctagacatagaagaccagctggtgttcttgaagtctcggaaacgcttagcagaagctgcagacctgctgaacagggaaggtaggagagaagaggctgccctgctgatgaagcaacatggctgcctcctggaggctgccaggctcactgccgacaaggacttccaggcctcatgtctgctgggggccgcccgcctcaatgtggccagggattccgacatagaacacaccaaggacattctgagagaagcacttgatatctgctatcaaactggccagttgtctggcattgcggaggcccacttcctgcaaggggtaatcctgagagactttcagaagctcagggatgccttcttcaagtttgacacgctcaaccactcagctggagtggtggaagcactctacgaagcagccagccagtgtgaggccgagcctgagaagattctgggcctggctccagggggcttggaaatcctcctcagtctggtcagggctctcaaaagagtgaccaacaatgctgagaaggaaatggtcaaatcttgctttgagttttttgggatttcccaggtggatgccaagtattgccagatagctcagaatgaccctgggcccatattaagaataatttttgacctggatttgaacttgagagagaaaaaaacaaaagatcattttttgataatgactgaccaagtgaaattagccctaaacaaacaccttttgggcaggctgtgtcagatcacacggagcctgcttgggaagacctaccgaggagtctgcatgaggtttattgtaggcttaaaatgtgaggatgaaaactgtgaacattttcacaggcctctgcggcgttgtgaagccaagtgtttagttcagtcgaaaatgaacttggtggcaatcaacgggttgcttttggaagccaaaaaagtattccctaaaatcttagcagaagaacttaaagaaattgattatattttgtctacagatatgtatggcctttgcaagtccattctggatgtccttttccctaagcatttccatcagagagtgttgtcagaaaaccccatggcatgcaaagaaatcctcaaaccaaattacaaatccttccggttctacagatttgctttgaaggagtacatccactttctgtttgaaaatgaaagcgcacgcaaccgccgggaatccacagacctgtggctgagtgccatgcaagctttccttctctcttccaactacccggaggagtttgaaaagctgctccaccaggaggaggacaactacaacagggaactcaaagctctagagtctgaaaaggatgaaaggggcagggggagaggcagcaggataaaaggaatagaagggaaatttggcatgctggcacccaacagggatgatgaaaatatggacaagacccacctgtgcttcatccggcttctggagaattgcattgatcaattctacgtgtacaggaacccagaagactacaagaggctctttttccgtttcatgaatgtcctcatcaagaggtgcaaagaaccactcatccccagcattggaaacacagtagccctcctggagttccagttcatccactgtggggtggtgctggcccgcctctggaagaatgtcattctatgcctccccaagagctacattgcactcttgcactactgggagttcctgtttagcaagaaggacaaggagcttggggatgtgttctccatcattcaggaatacaaacccaaggacgtgacaagagccattcaggatttccggttccatctctcctacctcgccaaggtgctatgtggctatgagaatgtgaacttcaacgtcctgcttgatgccttcagtgaaatagactatgtggtctcgggtgaggctgagcggacactggtgctgtgcttggtgatgctagtgaatgctgaggagatcctgcagccatactgcaagcctctcctgtatcgccacttccgggagattgagtcaaggctgcagctcatgagcatggactgccctggccaggttcccgagaggctcctgaaggtggtgaagcgggtcttggtggcagtcaatgtgaagtctgtggctgaggcactgcaggacctgctctttgagcgggatgaagagtacctaatggactgtgactggcggtgggaccctgtgcacaccaaagggtccatagtccgtggcctctattatgaggaggtcagactaaaccgcctgctctgtttggaccctgtggactactttgctgaacctgagtgtgagtttggccaggatgagatggatgaactggcattagaagaccgagaccacgtcctggccaccattctttcccaaaagcaacggaaggcctccatacagcggaagttgaggagggcatgcctggtggtgtctctgtgcatcagttggaggagaagagtgggcacccagatggagcgtgtcagggaggaggccagggagcccagggctgggaacttcaaaaaggcagacgtggacaggacccagtgtgacctatgtggagtgaagtttacccgtggcccagagaactatttcagccccagcaaagcgtttgagggggcagcttccgaggtggcagtcctttccagggctgagctggaaagggaggagtgtcaggagaggaacagcgagtcttacgagcagcatatccatctagaacaccaccagaggcagcaagtggcctaccagaaatactcagaatttttccacgagaaggtggacccggccattgatgaaggcaagctggtggtgcaggacatcgagcaaagtgtatggatccacagtcacgtgggctccaaggagcacagccacatgctgcagaaggtccaggagcacatcaagagggtttcggatatggtggaggacctctacaggcggaaggcctgggctggcgcggaggaggcgatgactcggctggtcaacattctgatcctgtcagtcagggatgcacgagactggttgatgaaaacagagacccgcttaaagaaggaaggtattgttcaggaagatgattatgaaaatgaagttgaagactttggtgagcttcggcctagaaggcgttctcggaaatgtggaaagcagagaaaatactaatgtccacacagctgcagcctcctcatccttcggaacattccattctgacttagaattctgagcgctggggcagaagacaaaaagaatgtgaattagcattttaaaaatagataggggagtctaacaacaccattgctttttattctcattacttctctttcagtggcttaggatctgattgctccctcacctctaaagtgtttccaagtagagtctggcagtattagtttcccccacaaacaaattcaggtagagaagttgtagtcgaagggaatgttgggactcctcactgcatggtccctggggtgtctggctcatccccatcatgacatgagttggtagcagaggactaggtgttaggacagactctcctcacctcagttgctgctgctctgggccaggaaatctctctatggattccctcatctcctgccacactgctgcagcatcaagtgtgctatgagagctgtatgtgcccaggggtgggccctgccactggccaccccgagcccaggacgcattctggtcatctctgagcccacttgtagtgtagcttcttctgttagagatgttagccttttctctctgtggcgacttttctgccttcccttcttctgttttttgtgatcattcttagctacctgtgccaagtcacagttagactacctcagaatgtagtcaagaattcacccagtgttctttggatgtcccttccctagggggaaaggctggggaatgttgctgggagcattcccagctgcctctccaaagtggtcctaactctgccttggctatggtgcagacattccaaaaagtgttttgtatacagccctgtacatctagttttcttggttctccctggcaagttcgctaccctagcttaggctgacgttctgatgagtctctgcttgctgagctcatcactgtgggatggtgacctgcagagctgcagattggagcaagtggacagaggagggagccagctaagccaaatccgtcactgccacttggctggcaggccttataagagggcggatctgggcccgtttgcaggaggccattgcctaccctctccccacagtgagccagcagccatcagctgatcccacctgggaaaccttcatgcctctctgatggttactgcccacccttaccccacccctcagctcagcctggtatggaaagcaaggtgcacgttggtctttgattgttctgtcctcacagcagagccagctttccccccatgttgctgctgcttttgctgctcatgctgcttgttgttttctcttccttatctttccaaattgtttccttgaaatgcttgtttccaatttttcttagattatgtttctaatttttattccaggtgtttttttttcttacttgacagaaaaaaagaaaaccccaacaatatcttgctgtattatcacattttttataaagttaaagcatttctctt

SEQ ID NO: 282 - DNA, 5432 bp, Homo sapiens
  Genbank Accession No. AB002379
gcaagaccaaggtggctgtgctggagatcctgggtgctgtgtgcctcgtgcctggtggccacaagaaggtgctgcaggccatgctgcactaccaggtgtatgcagcagagcgaacccgcttccagaccctgctgaacgagctagaccgaagtctgggccggtaccgggatgaagtgaatctgaaaacagccatcatgtccttcatcaatgctgtcctcaatgctggagctggagaggataatctggagttccgcctacatctacggtatgaattcctgatgctgggtatacagcctgtgattgacaagctccggcaacatgaaaatgccatcctggacaaacatttagacttcttcgagatggtgcggaatgaggatgacctggagctagccaggaggtttgacatggtccacatcgacaccaagagtgcttcccagatgtttgagttgatccacaagaagctgaagtacacggaggcctacccctgcctgctctctgtgctgcaccactgcctgcagatgccctacaaacggaacggtggctacttccagcagtggcagctcctggaccgcatcctccagcagattgtcctccaggatgagcggggtgtggaccctgacctggctcccttggagaacttcaatgtcaagaacatcgtcaacatgctcatcaacgagaatgaagtgaaacagtggcgagaccaggcagagaagttccggaaagaacacatggagcttgtgagccgtctggagaggaaggagcgggaatgcgagacaaagacattggagaaggaagagatgatgcggacgctgaacaaaatgaaggacaagctggcccgggagtcccaggagctgcgccaggctcggggacaagtggcagagctggtagcccagctcagtgaactctcaacaggccctgtatcttccccaccaccccctgggggcccactcaccttgtcttcctcaatgacaaccaatgacctgcctccaccccctcctcctctgccctttgcctgttgtccccctcccccaccaccaccccttcctcccgggggacccccgactcccccaggtgccccaccttgcctcggcatgggcctgcccctccctcaggacccctaccccagcagtgacgtcccactcaggaaaaagcgtgtcccccagccttctcacccactgaagtccttcaactgggtgaagctgaatgaggagcgtgtccctggcaccgtatggaatgagattgatgacatgcaggtatttcggatcctggacctagaggattttgaaaaaatgttttcagcctaccagaggcaccaggagctgataactaatccttctcagcagaaagagctgggctccactgaagacatatacctggcttcccgcaaggtcaaagagctgtcggtcattgatggccggagggcccaaaactgcatcatccttctttccaagttgaagctttctaacgaggagatccggcaggccatcttgaagatggatgagcaggaggaccttgctaaggacatgctggagcagctcctcaagttcatcccagagaagagtgacattgacctcctggaggagcacaagcatgaaattgagcggatggcccgtgctgaccgcttcctctatgaaatgagcaggattgaccactaccagcagcgactgcaagccctcttcttcaagaagaaattccaggagcggctggctgaggcaaagcccaaagtggaagccatcctgttggcctcccgggagctggtccgcagcaagcgtcttagacagatgctagaggtcatcctagccataggcaacttcatgaacaaagggcagcgtgggggcgcctacgggttccgggtggccagcctcaacaagatcgctgacaccaagtccagcatcgacagaaacatctctctgctccattacctgatcatgatcctggagaagcattttcctgatattctaaacatgccttcagagctgcaacatcttccagaagccgccaaagtcaacctagcagaactggagaaggaggtgggcaacctcaggaggggcctgagagcggtggaggtggagctggagtatcagaggcgccaggtacgggagcccagtgacaagtttgtccctgtcatgagcgacttcatcacggtgtccagcttcagcttctccgagctggaggaccagctaaatgaggccagggacaagttcgccaaggccttgatgcacttcggggagcatgacagcaagatgcagccagacgaattctttggcatctttgataccttcttgcaggccttctcagaggcccggcaggatctagaggccatgaggaggaggaaggaggaggaggagcggcgggcgcgcatggaagccatgctgaaggagcagagggaacgtgagcggtggcagcggcagcggaaggtcctggctgcaggcagctcgctggaggagggaggagagttcgatgacctggtgtcggccctgcgctctggggaggtcttcgacaaggacttatgcaagctcaagcgcagccgcaagcgatcagggagccaggccctggaagttacccgggagcgggcaataaaccggctaaattattgacctggggaactagccacacaggaggccgggagacagggactggtgagaatggggctgagtggaggaggtggtgatatttaaaccatttggtgcttggtttagagccttgggctgggtcctgggatggggggctgtgtgtggctggaccaggtgtctccccacgcttaccttaaggggctcctcttatctccccttcacatgattccttctgtgccctggccccaggtattattctgaggctgccttggatggcctcaggccaggtaaccccaggctgaaggggccctgctccccatcccctaccatgggcacccatgtgctggcacagaacagttccagatctagactggagaggtccacagccttgtccagagttcctgtgtagcacggggagcaatgatggagggagcccctgagagggaatctggtgagggaatccagactcccttctctcaaggggaggctcaacagaacattgacctgggggcaaactttcctcttgaatgggaacagaggaggcattatatattctagttagatcagctctggtaggttccagagaacagtcaatgttggaaggatgatgcagggaccaaagccatcaggacagagtagcagtgtctgtttcccatgtcacaagtcctctggcctctccctgcatgtcttaagtatctttcccttccttctctaccctcacctccatcctgtctactaatccacagtcctagaagactcaccttgggtttccacagctatggctcactaccaggtgcttgatgaatctggcgaggggctcaagacagacctcatgcatcaccacacctcatgccttttgggcatctcccatgtccccatctcctggacacctggccattgttgtgaagccagacagtgacctcaaatgttgccttggagtcccctacagcccctcagcagagggcagcacttgaatgcttagctccatcccatagttctctacttcatataaattgctcaggccctcccaccccttctctaacactagcttcaaggcagaagccacagcagcctctgtccagcctgcaggtggccacttggaaccatgtgtccactggcgttggggagttggttcctgagaggtctgagggccagagctgccctctacattaacatgctgtctctaagggtggcccctcctctcaggcgttcagatggtgcgaacagcagagcaggcaagggaaactggggagatggggatggaggaggaaggctgatatcctctggggagcacatcacctgaaggtgccaaggaggaaggctgagaggggggccaccccatttctggtacccaatttggttcttcagcccaacttgcaaggggttccttctggtcctcccatccactgccaccttccattttgtccatctcatgctggccttggtggatgggatggctgtatctagacaaaatttttctaaaactccatcaaggctcttattcaataccacgttccgagttggcctttcatcttctttgagactggccctgcctaacctctaccatcaatgagctcttggcccttctgcccttccctgtgtttctcactttccaacctaatccctggctcagggttattgccagtggagactggtgagctgggcctactctcagctgcctatcttctgcctttcacttgcatccaactcctggggctgggaccgtagtagctgcggtgggggagaaacacagggtcggtgagcccagcatgtgcgttggtttgagggggcgggcggtgtgtgtgtgttctggtgggagggatctgagcaagtgcaagcctggctgacacaggtgtgaagaggccatcctggaacccaggtgagggcaagatgaaggcttccaggcagaacagctgcagagagtttggctatatgcatctgcagccccaagagctcccactgcaagacaagtgttggggaagatgggaggttgtgggtgaggcctctaaaggtcctctcccaaactgaccaggctgatgtcaacctaaccccctcaggggcagggaacaggggagggctccacaagcgtgtctggcattcccacccaccatggaagactggatacgcacctggaaacaaaaggactatggaagctgttcaagatacatttgatcttcagaaaagcagaatttggttcaactgttgacagaggacacaaatacgttgttccagagctcagccttctcactctaaaagaaagatatttttctatttattttctacatctggccagtggctctggtgctagatgccactgtagccagatctccaacagtgccttggaccatggactcatactcaactgagtaagaaggggctggtgcccagtcggggtggctgagctggtccttaataggttgtttcttggtcttgctttcttcatgccctccccactgctcctgccacctttagataagtttctctagctaattttgtggccaatgtaaaattcgtcatcaacctaacaaacacaaccttctcagcagcatttctcccctgtgatggaaataaataaagtgtttagggcagtgggaggagaaaattctccaggtgaatggggaagggtctgttccagcctctccctactcccatcccatttccaccaactggggaactgtgactatctatctcccccgacttctaccagggatgccttcaagccaaggctgttctcaccagctgcctcagatgacaaatgaggctaatggacataatctacagtgtcctttttcacttgcaccttttttataagaatatattgtaatactaaaaaatattaaattcataccatccctaccc

SEQ ID NO: 283 - DNA, 760 bp, Homo sapiens
  Genbank Accession No. AF001294
agagccggcgccgtcaccgcccgcattgccgctcccagtcccgcgctcggcacgacatgaaatcccccgacgaggtgctacgcgagggcgagttggagaagcgcagcgacagcctcttccagctatggaagaagaagcgcggggtgctcacctccgaccgcctgagcctgttccccgccagcccccgcgcgcgccccaaggagctgcgcttccactccatcctcaaggtggactgcgtggagcgcacgggcaagtacgtgtacttcaccatcgtcaccaccgaccacaaggagatcgacttccgctgcgcgggcgagagctgctggaacgcggccatcgcgctggcgctcatcgatttccagaaccgccgcgccctgcaggactttcgcagccgccaggaacgcaccgcacccgccgcacccgccgaggacgccgtggctgccgcggccgccgcaccctccgagccctcggagccctccaggccatccccgcagcccaaaccccgcacgccatgagcccgccgcgggccatacgctggacgagtcggaccgaggctaggacgtggccggcgctctccagccctgcagcagaagaacttcccgtgcgcgcggatcctcgctccgttgcacgggcgccttaagttattggactatctaatatctatgtatttatttcgctggttctttgtagtcacatattttatagtcttaatatcttgtttttgcatcactgtgcccattgcaaataaatcacttggcca

SEQ ID NO: 284 - DNA, 3111 bp, Homo sapiens
  Genbank Accession No. AF010193
ggcacgagcggagagccgcgcagggcgcgggccgcgcggggtggggcagccggagcgcaggcccccgatccccggcgggcgcccccgggcccccgcgcgcgccccggcctccgggagactggcgcatgccacggagcgcccctcgggccgccgccgctcctgcccgggcccctgctgctgctgctgtcgcctgcgcctgctgccccaactcggcgcccgacttcttcatggtgtgcggaggtcatgttcgctccttagcaggcaaacgacttttctcctcgcctcctcgccccgcatgttcaggaccaaacgatctgcgctcgtccggcgtctctggaggagccgtgcgcccggcggcgaggacgaggaggagggcgcagggggaggtggaggaggaggcgagctgcggggagaaggggcgacggacagccgagcgcatggggccggtggcggcggcccgggcagggctggatgctgcctgggcaaggcggtgcgaggtgccaaaggtcaccaccatccccacccgccagccgcgggcgccggcgcggccgggggcgccgaggcggatctgaaggcgctcacgcactcggtgctcaagaaactgaaggagcggcagctggagctgctgctccaggccgtggagtcccgcggcgggacgcgcaccgcgtgcctcctgctgcccggccgcctggactgcaggctgggcccgggggcgcccgccggcgcgcagcctgcgcagccgccctcgtcctactcgctccccctcctgctgtgcaaagtgttcaggtggccggatctcaggcattcctcggaagtcaagaggctgtgttgctgtgaatcttacgggaagatcaaccccgagctggtgtgctgcaacccccatcaccttagccgactctgcgaactagagtctcccccccctccttactccagatacccgatggattttctcaaaccaactgcagactgtccagatgctgtgccttcctccgctgaaacagggggaacgaattatctggcccctggggggctttcagattcccaacttcttctggagcctggggatcggtcacactggtgcgtggtggcatactgggaggagaagacgagagtggggaggctctactgtgtccaggagccctctctggatatcttctatgatctacctcaggggaatggcttttgcctcggacagctcaattcggacaacaagagtcagctggtgcagaaggtgcggagcaaaatcggctgcggcatccagctgacgcgggaggtggatggtgtgtgggtgtacaaccgcagcagttaccccatcttcatcaagtccgccacactggacaacccggactccaggacgctgttggtacacaaggtgttccccggtttctccatcaaggctttcgactacgagaaggcgtacagcctgcagcggcccaatgaccacgagtttatgcagcagccgtggacgggctttaccgtgcagatcagctttgtgaagggctggggtcagtgctacacccgccagttcatcagcagctgcccgtgctggctagaggtcatcttcaacagccggtagccgcgtgcggaggggacagagcgtgagctgagcaggccacacttcaaactactttgctgctaatattttcctcctgagtgcttgcttttcatgcaaactctttggtcgttttttttttgtttgttggttggttttcttcttctcgtcctcgtttgtgttctgttttgtttcgctctttgagaaatagcttatgaaaagaattgttgggggtttttttggaagaaggggcaggtatgatcggcaggacaccctgataggaagaggggaagcagaaatccaagcaccaccaaacacagtgtatgaaggggggcggtcatcatttcacttgtcaggagtgtgtgtgagtgtgagtgtgcggctgtgtgtgcacgcgtgtgcaggagcggcagatggggagacaacgtgctctttgttttgtgtctcttatggatgtccccagcagagaggtttgcagtcccaagcggtgtctctcctgccccttggacacgctcagtggggcagaggcagtacctgggcaagctggcggctggggtcccagcagctgccaggagcacggctctgtccccagcctgggaaagcccctgcccctcctctccctcatcaaggacacgggcctgtccacaggcttctgagcagcgagcctgctagtggccgaaccagaaccaattattttcatccttgtcttattcccttcctgccagcccctgccattgtagcgtctttcttttttggccatctgctcctggatctccctgagatgggcttcccaagggctgccggggcagccccctcacagtattgctcacccagtgccctctcccctcagcctctcccctgcctgccctggtgacatcaggtttttcccggacttagaaaaccagctcagcactgcctgctcccatcctgtgtgttaagctctgctattaggccagcaagcggggatgtccctgggagggacatgcttagcagtccccttccctccaagaaggatttggtccgtcataacccaaggtaccatcctaggctgacacctaactcttctttcatttcttctacaactcatacactcgtatgatacttcgacactgttcttagctcaatgagcatgtttagactttaacataagctatttttctaactacaaaggtttaaatgaacaagagaagcattctcattggaaatttagcattgtagtgctttgagagagaaaggactcctgaaaaaaaacctgagatttattaaagaaaaaaatgtattttatgttatatataaatatattattacttgtaaatataaagacgttttataagcatcattatttatgtattgtgcaatgtgtataaacaagaaaaataaagaaaagatgcactttgctttaatataaatgcaaataacaaatgccaaattaaaaaagataaacacaagattggtgttttttcctatgggtgttatcacctagctgaatgtttttctaaaggagtttatgttccattaaacgatttttaaaatgtacacttgaaaaaaaaaaaaaaaaa

SEQ ID NO: 285 - DNA, 1601 bp, Homo sapiens
  Genbank Accession No. AF141349
ttcctgccgttgcgtttgcacctcgctgctccagcctctggggcgcattccaaccttccagcctgcgacctgcggagaaaaaaaattacttattttcttgccccatacataccttgaggcgagcaaaaaaattaaattttaaccatgagggaaatcgtgcacatccaggctggtcagtgtggcaaccagatcggtgccaagttctgggaggtgatcagtgatgaacatggcatcgaccccaccggcacctaccacggggacagcgacctgcagctggaccgcatctctgtgtactacaatgaagccacaggtggcaaatatgttcctcgtgccatcctggtggatctagaacctgggaccatggactctgttcgctcaggtccttttggccagatctttagaccagacaactttgtatttggtcagtctggggcaggtaacaactgggccaaaggccactacacagagggcgccgagctggttgattctgtcctggatgtggtacggaaggaggcagagagctgtgactgcctgcagggcttccagctgacccactcactgggcgggggcacaggctctggaatgggcactctccttatcagcaagatccgagaagaataccctgatcgcatcatgaataccttcagtgtggtgccttcacccaaagtgtctgacaccgtggtcgagccctacaatgccaccctctccgtccatcagttggtagagaatactgatgagacctattgcattgacaacgaggccctctatgatatctgcttccgcactctgaagctgaccacaccaacctacggggatctgaaccaccttgtctcagccaccatgagtggtgtcaccacctgcctccgtttccctggccagctcaatgctgacctccgcaagttggcagtcaacatggtccccttcccacgtctccatttctttatgcctggctttgcccctctcaccagccgtggaagccagcagtatcgagctctcacagtgccggaactcacccagcaggtcttcgatgccaagaacatgatggctgcctgtgacccccgccacggccgatacctcaccgtggctgctgtcttccgtggtcggatgtccatgaaggaggtcgatgagcagatgcttaacgtgcagaacaagaacagcagctactttgtggaatggatccccaacaatgtcaagacagccgtctgtgacatcccacctcgtggcctcaagatggcagtcaccttcattggcaatagcacagccatccaggagctcttcaagcgcatctcggagcagttcactgccatgttccgccggaaggccttcctccactggtacacaggcgagggcatggacgagatggagttcaccgaggctgagagcaacatgaacgacctcgtctctgagtatcagcagtaccaggatgccaccgcagaagaggaggaggatttcggtgaggaggccgaagaggaggcctaaggcagagcccccatcacctcaggcttctcagttcccttagccgtcttactcaactgcccctttcctctccctcagaatttgtgtttgctgcctctatcttgttttttgttttttcttctggg

SEQ ID NO: 286 - DNA, 330 bp, Homo sapiens
  Genbank Accession No. C02016
  unsure (1)..(330): n = a or c or g or t
gatcctcactcaacgaaaactcggttggaaactgttccgcctggcagtccttttttnttgttttccatctcatttcccttccatctgaaagtggcattcagctgacttgctcatttagactgttcacggagtctgaatctgccaacgtggtgttggaggctccaccttgaaaagggccacagtcagggcaactttccccatacaggaaancttgaaaattacancaacagtctacgtcacagccaaattatatttcctttataccaaacanaactatggagaactaaaagtacancacacanaacgttnatagtgttttgcatgtgacct

SEQ ID NO: 287 - DNA, 2589 bp, Homo sapiens
  Genbank Accession No. D10522
caaccagggagatttctccattttcctcttgtctacagtgcggctacaaatctgggatttttttattacttctttttttttcgaactacacttgggctcctttttttgtgctcgacttttccaccctttttccctccctcctgtgctgctgctttttgatctcttcgactaaaatttttttatccggagtgtatttaatcggttctgttctgtcctctccaccacccccacccccctccctccggtgtgtgtgccgctgccgctgttgccgccgccgctgctgctgctgctcgccccgtcgttacaccaacccgaggctctttgtttcccctcttggatctgttgagtttctttgttgaagaagccagcatgggtgcccagttctccaagaccgcagcgaagggagaagccgccgcggagaggcctggggaggcggctgtggcctcgtcgccttccaaagcgaacggacaggagaatggccacgtgaaggtaaacggcgacgcttcgcccgcggccgccgagtcgggcgccaaggaggagctgcaggccaacggcagcgccccggccgccgacaaggaggagcccgcggccgccgggagcggggcggcgtcgccctcctcggccgagaaaggtgagccggccgccgccgctgcccccgaggccggggccagcccggtagagaaggaggcccccgcggaaggcgaggctgccgagcccggctcggccacggccgcggagggagaggccgcgtcggccgcctcctcgacttcttcgcccaaggccgaggacggggccacgccctcgcccagcaacgagaccccgaaaaaaaaaaagaagcgcttttccttcaagaagtctttcaagctgagcggcttctccttcaagaagaacaagaaggaggctggagaaggcggtgaggctgaggcgcccgctgccgaaggcggcaaggacgaggccgccgggggcgcagctgcggccgccgccgaggcgggcgcggcctccggggagcaggcagcggcgccgggcgaggaggcggcagcgggcgaggagggggcggcgggtggcgacccgcaggaggccaagccccaggaggccgctgtcgcgccagagaagccgcccgccagcgacgagaccaaggccgccgaggagcccagcaaggtggaggagaaaaaggccgaggaggccggggccagcgccgccgcctgcgaggccccctccgccgccgggcccggcgcgcccccggagcaggaggcagcccccgcggaggagcccgcggccgccgcagcctcgtcagcctgcgcagccccctcacaggaggcccagcccgagtgcagtccagaagcccccccagcggaggcggcagagtaaaagagcaagcttttgtgagataatcgaagaacttttctcccccgtttgtttgttggagtggtgccaggtactgttttggagaacttgtctacaaccagggattgattttaaagatgtctttttttattttacttttttttaagcaccaaattttgttgtttttttttttctcccctccccacagatcccatctcaaatcattctgttaaccaccattccaacaggtcgaggagagcttaaacaccttcttcctctgccttgtttctcttttattttttattttttcgcatcagtattaatgtttttgcatactttgcatctttattcaaaagtgtaaactttctttgtcaatctatggacatgcccatatatgaaggagatgggtgggtcaaaaagggatatcaaatgaagtgataggggtcacaatggggaaattgaagtggtgcataacattgccaaaatagtgtgccactagaaatggtgtaaaggctgtctttttttttttttttaaagaaaagttattaccatgtattttgtgaggcaggtttacaacactacaagtcttgagttaagaaggaaagaggaaaaaagaaaaaacaccaatacccagatttaaaaaaaaaaaaacgatcatagtcttaggagttcatttaaaccataggaacttttcacttatctcatgttagctgtaccagtcagtgattaagtagaactacaagttgtataggctttattgtttattgctggtttatgaccttaataaagtgtaattatgtattaccagcagggtgtttttaactgtgactattgtataaaaacaaatcttgatatccagaagcacatgaagtttgcaactttccaccctgcccatttttgtaaaactgcagtcatcttggaccttttaaaacacaaattttaaactcaaccaagctgtgataagtggaatggttactgtttatactgtggtatgtttttgattacagcagataatgctttcttttccagtcgtctttgagaataaaggaaaaaaaatcttcagatgcaatggttttgtgtagcatcttgtctatcatgttttgtaaatactggagaagctttgaccaatttgacttagagatggaatgtaactttgcttacaaaaattgctattaaactcctgcttaaggtgttctaattttctgtgagcacactaaaagcgaaaaataaatgtgaataaaatgt

SEQ ID NO: 288 - DNA, 332 bp, Homo sapiens
  Genbank Accession No. D11824
  unsure (1)..(332): n = a or c or g or t
gatcgagaatgtttgcaacgaccgnctggggaagaaggtccgcgttaaangcaacacggatgataccatcggannnccttaagaagctgattgcagcccaaactggtacccgttggaacaagattgtcctgaagaagtggtacacgattttaaaggaccacgtgtctctgggggactatgaaatccacgatgggatgaacctggagctttatnatcancnnnatgagaatcctcatcttcctgccccgctttcctctcccatcctcatcccccacactgggatagatgcttgtttgtaaaaagggaccttaataaagacttagatgttgaaa

SEQ ID NO: 289 - DNA, 4211 bp, Homo sapiens
  Genbank Accession No. D13628
gcagcagatagggtagaggaaagggtctagaatatgtacacgcagctgactcaggcaggctccatgctgaacggtcacacagagaggaaacaataaatctcagctactatgcaataaatatctcaagttttaacgaagaaaaacatcattgcagtgaaataaaaaattttaaaattttagaacaaagctaacaaatggctagttttctatgattcttcttcaaacgctttctttgagggggaaagagtcaaacaaacaagcagttttacctgaaataaagaactagttttagaggtcagaagaaaggagcaagttttgcgagaggcacggaaggagtgtgctggcagtacaatgacagttttcctttcctttgctttcctcgctgccattctgactcacatagggtgcagcaatcagcgccgaagtccagaaaacagtgggagaagatataaccggattcaacatgggcaatgtgcctacactttcattcttccagaacacgatggcaactgtcgtgagagtacgacagaccagtacaacacaaacgctctgcagagagatgctccacacgtggaaccggatttctcttcccagaaacttcaacatctggaacatgtgatggaaaattatactcagtggctgcaaaaacttgagaattacattgtggaaaacatgaagtcggagatggcccagatacagcagaatgcagttcagaaccacacggctaccatgctggagataggaaccagcctcctctctcagactgcagagcagaccagaaagctgacagatgttgagacccaggtactaaatcaaacttctcgacttgagatacagctgctggagaattcattatccacctacaagctagagaagcaacttcttcaacagacaaatgaaatcttgaagatccatgaaaaaaacagtttattagaacataaaatcttagaaatggaaggaaaacacaaggaagagttggacaccttaaaggaagagaaagagaaccttcaaggcttggttactcgtcaaacatatataatccaggagctggaaaagcaattaaacagagctaccaccaacaacagtgtccttcagaagcagcaactggagctgatggacacagtccacaaccttgtcaatctttgcactaaagaaggtgttttactaaagggaggaaaaagagaggaagagaaaccatttagagactgtgcagatgtatatcaagctggttttaataaaagtggaatctacactatttatattaataatatgccagaacccaaaaaggtgttttgcaatatggatgtcaatgggggaggttggactgtaatacaacatcgtgaagatggaagtctagatttccaaagaggctggaaggaatataaaatgggttttggaaatccctccggtgaatattggctggggaatgagtttatttttgccattaccagtcagaggcagtacatgctaagaattgagttaatggactgggaagggaaccgagcctattcacagtatgacagattccacataggaaatgaaaagcaaaactataggttgtatttaaaaggtcacactgggacagcaggaaaacagagcagcctgatcttacacggtgctgatttcagcactaaagatgctgataatgacaactgtatgtgcaaatgtgccctcatgttaacaggaggatggtggtttgatgcttgtggcccctccaatctaaatggaatgttctatactgcgggacaaaaccatggaaaactgaatgggataaagtggcactacttcaaagggcccagttactccttacgttccacaactatgatgattcgacctttagatttttgaaagcgcaatgtcagaagcgattatgaaagcaacaaagaaatccggagaagctgccaggtgagaaactgtttgaaaacttcagaagcaaacaatattgtctcccttccagcaataagtggtagttatgtgaagtcaccaaggttcttgaccgtgaatctggagccgtttgagttcacaagagtctctacttggggtgacagtgctcacgtggctcgactatagaaaactccactgactgtcgggctttaaaaagggaagaaactgctgagcttgctgtgcttcaaactactactggaccttattttggaactatggtagccagatgataaatatggttaatttcatgtaaaacagaaaaaaagagtgaaaaagagaatatacatgaagaatagaaacaagcctgccataatcctttggaaaagatgtattataccagtgaaaaggtgttatatctatgcaaacctactaacaaattatactgttgcacaattttgataaaaatttagaacagcattgtcctctgagttggttaaatgttaatggatttcagaagcctaattccagtatcatacttactagttgatttctgcttacccatcttcaaatgaaaattccatttttgtaagccataatgaactgtagtacatggacaataagtgtgtggtagaaacaaactccattactctgatttttgatacagttttcagaaaaagaaatgaacataatcaagtaaggatgtatgtggtgaaaacttaccacccccatactatggttttcatttactctaaaaactgattgaatgatatataaatatatttatagcctgagtaaagttaaaagaatgtaaaatatatcatcaagttcttaaaataatatacatgcatttaatatttcctttgatattatacaggaaagcaatattttggagtatgttaagttgaagtaaaagcaagtactctggagcagttcattttacagtatctacttgcatgtgtatacatacatgtaacttcattattttaaaaatatttttagaactccaatactcaccctgttatgtcttgctaatttaaattttgctaattaactgaaacatgcttaccagattcacactgttccagtgtctataaaagaaacactttgaagtctataaaaaataaaataattataaatatcattgtacatagcatgtttatatctgcaaaaaacctaatagctaattaatctggaatatgcaacattgtccttaattgatgcaaataacacaaatgctcaaagaaatctactatatcccttaatgaaatacatcattcttcatatatttctccttcagtccattcccttaggcaatttttaatttttaaaaattattatcaggggagaaaaattggcaaaactattatatgtaagggaaatatatacaaaaagaaaattaatcatagtcacctgactaagaaattctgactgctagttgccataaataactcaatggaaatattcctatgggataatgtattttaagtgaatttttggggtgcttgaagttactgcattattttatcaagaagtcttctctgcctgtaagtgtccaaggttatgacagtaaacagtttttattaaaacatgagtcactatgggatgagaaaattgaaataaagctactgggcctcctctcataaaagagacagttgttggcaaggtagcaataccagtttcaaacttggtgacttgatccactatgccttaatggtttcctccatttgagaaaataaagctattcacattgttaagaaaaatactttttaaagtttaccatcaagtcttttttatatttatgtgtctgtattctacccctttttgccttacaagtgatatttgcaggtattataccatttttctattcttggtggcttcttcatagcaggtaagcctctccttctaaaaacttctcaactgttttcatttaagggaaagaaaatgagtattttgtccttttgtgttcctacagacactttcttaaaccagtttttggataaagaatactatttccaaactcatattacaaaaacaaaataaaataataaaaaaagaaagcatgatatttactgttttgttgtctgggtttgagaaatgaaatattgtttccaattatttataataaatcagtataaaatgttttatgattgttatgtgtattatgtaatacgtacatgtttatggcaatttaacatgtgtattcttttaattgtttcagaataggataattaggtattcgaattttgtctttaaaattcatgtggtttctatgcaaagttcttcatatcatcacaacattatttgatttaaataaaattgaaagtaat

SEQ ID NO: 290 - DNA, 4187 bp, Homo sapiens
  Genbank Accession No. D13643
ggcgcgaacccgcagcgcttaccgcgcggcgccgcaccatggagcccgccgtgtcgctggccgtgtgcgcgctgctcttcctgctgtgggtgcgcctgaaggggctggagttcgtgctcatccaccagcgctgggtgttcgtgtgcctcttcctcctgccgctctcgcttatcttcgatatctactactacgtgcgcgcctgggtggtgttcaagctcagcagcgctccgcgcctgcacgagcagcgcgtgcgggacatccagaagcaggtgcgggaatggaaggagcagggtagcaagaccttcatgtgcacggggcgccctggctggctcactgtctcactacgtgtcgggaagtacaagaagacacacaaaaacatcatgatcaacctgatggacattctggaagtggacaccaagaaacagattgtccgtgtggagcccttggtgaccatgggccaggtgactgccctgctgacctccattggctggactctccccgtgttgcctgagcttgatgacctcacagtggggggcttgatcatgggcacaggcatcgagtcatcatcccacaagtacggcctgttccaacacatctgcactgcttacgagctggtcctggctgatggcagctttgtgcgatgcactccgtccgaaaactcagacctgttctatgccgtaccctggtcctgtgggacgctgggtttcctggtggccgctgagatccgcatcatccctgccaagaagtacgtcaagctgcgtttcgagccagtgcggggcctggaggctatctgtgccaagttcacccacgagtcccagcggcaggagaaccacttcgtggaagggctgctctactccctggatgaggctgtcattatgacaggggtcatgacagatgaggcagagcccagcaagctgaatagcattggcaattactacaagccgtggttctttaagcatgtggagaactatctgaagacaaaccgagagggcctggagtacattcccttgagacactactaccaccgccacacgcgcagcatcttctgggagctccaggacatcatcccctttggcaacaaccccatcttccgctacctctttggctggatggtgcctcccaagatctccctcctgaagctgacccagggtgagaccctgcgcaagctgtacgagcagcaccacgtggtgcaggacatgctggtgcccatgaagtgcctgcagcaggccctgcacaccttccaaaacgacatccacgtctaccccatctggctgtgtccgttcatcctgcccagccagccaggcctagtgcaccccaaaggaaatgaggcagagctctacatcgacattggagcatatggggagccgcgtgtgaaacactttgaagccaggtcctgcatgaggcagctggagaagtttgtccgcagcgtgcatggcttccagatgctgtatgccgactgctacatgaaccgggaggagttctgggagatgtttgatggctccttgtaccacaagctgcgagagaagctgggttgccaggacgccttccccgaggtgtacgacaagatctgcaaggccgccaggcactgagctggagcccgcctggagagacagacacgtgtgagtggtcaggcatcttcccttcactcaagcttggctgctttcctagatccacactttcaaagagaaacccctccagaactcccaccctgacagcccaacaccaccttcctcctggcttccagggggcagcccagtggaatggaaagaatgtgggatttggagtcagacaagcctgagtccagttccccgtttagaactcattagctgtgtgactctgggtgagtcccttaacccctctgagcccgggtctcttcattagttgaaagggatagtaatacctacttgcaggttgttgtcatctgagttgagcactggtcacattgaaggtgctgggtaagtggtagctcttgttgcttcccgttcagcgtcacatctgcagtggagcctgaaaaggctccacattaggtcacctgtgcacagccatggctggaatgatgaaggggatacgctggagttgccctgccatcgcctccatcagccagacgaggtcctcacaggagaaggacagctcttccccaccctgggatctcaggagggcagccacggagtggggaggccccagatgcgctgtgccaaagccaggtccgaggccaaagttctccctgccatccttggtgccgtcctgccccttcctccttcatgcctgggcctgcaggcccaccccagccaccactgagtccactcggagtgccctgtgttcctggagaaggcattccagggttgaatcttgtcccagcctcagcctgggacacctaggtggagagagtggtctccgctctgaattggatccaggggacctgggctcattcttcttggctcaccaaccctgcaggcctcatctttcccaaaacccactttgtcttggtgggagtgggtccgcgctgctctgcagcaggggctggggagtggacagcatcaggtgggaaagtggagtccaccctcatgtttctgtaggattctcaccgtggggctggaagaaaagagcatcgacttgatttctccaaccactcatccctctttttctttcttccaccactccccaccccagctgtagttaatttcagtgccttacaaatcctaagctcagagaaagttccatttccgttccagagggaagggaacctccctaggtccttccctggcttgttataacgcaaagcttggttgtttatgcaactctatcttaagaactgcccagcctcagctgaaaacccgaatctgagaaggaattgcgtcatgtaagggaagctggaattaagggagctgagccagtcatggttgtggcgtgtgagtcaggagacctaggtttcagcccctctctactgtcagcgagctgtgcaacgtgggcaagtcattgtcctctgagctgcagtttcctcatctgtcacatcgctacagacaagacctccctggaacccttctgattgtcttagacactgtggttgcaaaacccacggaaagcctcatttgtgtggaaagtcagaggaaaaatgatccagtggacacttggggattatctgtcattcaagatccttccttcaaccccaaggccagctcccatctcatttccagaaaggctcatacctggcttgcagggaagcatctgtcttgtcattccaggtgccagaatcctctcagagtcattgaagggtgttcacccatcccacccaaggcttggcacactgccagtgtcttagcagggtcttgtgagggctgggggcatccaggcactcagaaggcaaaggaaccaccctacccatttggcctctggagggggcagaagaaagaaagaaacctcatcctatattttacaaagcatgtgaattctggcattagctctcataggagacccatgtgcttccttgctcagtgcaaaactgatgattctacttgctgtagatgaatggttaacacgagctagttaaacagtgccattgttttgccagtgaagcctccaaccctaagccactgggacggtggccagagatgccagcagcctctgtcgcccttagtcatataaccaaaatccagaccttatccacaacccggggcttggaaaggaaggtattttggaatcacaccctccggttatgttgctccagtaaaatcttgcctggaaagaggcagtcttcttagcatggtgagctgagttcatggcttttttttgtagccagtcctgtccctggccatccatgtgatggttttggatggagttaaacttgatgccagtgggcagtgcatgtggaaagtatcagagtaagcctctcccctccagagccctgagtttcttggctgcatgaaggttttctttagaatcagaattgtagccagtttctttggccagaaggatgaatacttggatattactgaaagggaggggtggagatgggtgtggcagtgtatggtgtgtgatttttattttcttctttggtcatgggggccaaggagaaaggcatgaatcttccctgtcaggctcttacagccacaggcactgtgtctactgtctggaagacatgtccccgtggctgtggggccgctgcttctgtttaaataaaagtggcctgg

SEQ ID NO: 291 - DNA, 1199 bp, Homo sapiens
  Genbank Accession No. D14826
tggaacactttatgttgaactgtggtagaggaaacaagacagttctgtctgcagaagcccattatggctgtaactggagatgacacagatgaggaaactgaacttgccccaagtcacatggctgctgccactggtgacatgccaacttaccagatccgagctcctactgctgctttgccacagggagtggtgatggctgcatcgcccggaagtttgcgcagtccccagcagctggcagaagaagcaacacgcaaacgagagctgaggctaatgaaaaacagggaagctgcccgggagtgtcgcaggaagaagaaagaatatgtcaaatgtcttgaaaatcgtgtggctgtgcttgaaaaccaaaacaagactctcattgaggaactcaaggccctcaaagatctttattgccataaagtagagtaactgtctttgacttggaccttgtttactctaactaaggcaggagatgcagcagtcctacttattgccatgtggacttgtgggaaggacacgtgtgacctaagaatccagtttggattagtgtttgaaattgaattgggaatgttgttccaggatgtggaatgcagccgtgatcacacttaccgagcttactttgatctgtttgtcaatagcatgcaaaaaagctttgtttgccctttgcttctgctttttttcagggaagctgccaaagaatgtcgacgtcgaaagaaagaatatgtaaaatgtctggagagccgagttgcagtgctggaagtccagaacaagaagctgatagaggaacttgaaaccttgaaagacatttgttctcccaaaacagattactagaaattatttaactatgaactgaaggcagcatgtatagttgcttttgaaggaatacaatatatagctggcaagaatggtggcttcttttctttgtatcattcatcttcttctttaatcattcatcttcttctttaatcacttaacattcctaaaaatgcttcactgtacgtagttaagtcgtagctataacttcaaattttttaaaagggacaaactgtaaaaaatgtgtgtattcttaaaatgcaatatttgtaaggcttgttccaatgccacatacttgcagctcccattctatgtgtcatcaatagtgtcctatgcaataaattatttgcaggtctttaaatcattttaggaaggatgacaaaataagt

SEQ ID NO: 292 - DNA, 3406 bp, Homo sapiens
  Genbank Accession No. D21063
ctgtagtggcggagaggatcgtggtactgctatggcggaatcatcggaatccttcaccatggcatccagcccggcccagcgtcggcgaggcaatgatcctctcacctccagccctggccgaagctcccggcgtactgatgccctcacctccagccctggccgtgaccttccaccatttgaggatgagtccgaggggctcctaggcacagaggggcccctggaggaagaagaggatggagaggagctcattggagatggcatggaaagggactaccgcgccatcccagagctggacgcctatgaggccgagggactggctctggatgatgaggacgtagaggagctgacggccagtcagagggaggcagcagagcgggccatgcggcagcgtgaccgggaggctggccggggcctgggccgcatgcgccgtgggctcctgtatgacagcgatgaggaggacgaggagcgccctgcccgcaagcgccgccaggtggagcgggccacggaggacggcgaggaggacgaggagatgattgagagcatcgagaacctggaggatctcaaaggccactctgtgcgcgagtgggtgagcatggcgggcccccggctggagatccaccaccgcttcaagaacttcctgcgcactcacgtcgacagccacggccacaacgtcttcaaggagcgcatcagcgacatgtgcaaagagaaccgtgagagcctggtggtgaactatgaggacttggcagccagggagcacgtgctggcctacttcctgcctgaggcaccggcggagctgctgcagatctttgatgaggctgccctggaggtggtactggccatgtaccccaagtacgaccgcatcaccaaccacatccatgtccgcatctcccacctgcctctggtggaggagctgcgctcgctgaggcagctgcatctgaaccagctgatccgcaccagtggggtggtgaccagctgcactggcgtcctgccccagctcagcatggtcaagtacaactgcaacaagtgcaatttcgtcctgggtcctttctgccagtcccagaaccaggaggtgaaaccaggctcctgtcctgagtgccagtcggccggcccctttgaggtcaacatggaggagaccatctatcagaactaccagcgtatccgaatccaggagagtccaggcaaagtggcggctggccggctgccccgctccaaggacgccattctcctcgcagatctggtggacagctgcaagccaggagacgagatagagctgactggcatctatcacaacaactatgatggctccctcaacactgccaatggcttccctgtctttgccactgtcatcctagccaaccacgtggccaagaaggacaacaaggttgctgtaggggaactgaccgatgaagatgtgaagatgatcactagcctctccaaggatcagcagatcggagagaagatctttgccagcattgctccttccatctatggtcatgaagacatcaagagaggcctggctctggccctgttcggaggggagcccaaaaacccaggtggcaagcacaaggtacgtggtgatatcaacgtgctcttgtgcggagaccctggcacagcgaagtcgcagtttctcaagtatattgagaaagtgtccagccgagccatcttcaccactggccagggggcgtcggctgtgggcctcacggcgtatgtccagcggcaccctgtcagcagggagtggaccttggaggctggggccctggttctggctgaccgaggagtgtgtctcattgatgaatttgacaagatgaatgaccaggacagaaccagcatccatgaggccatggagcaacagagcatctccatctcgaaggctggcatcgtcacctccctgcaggctcgctgcacggtcattgctgccgccaaccccataggagggcgctacgacccctcgctgactttctctgagaacgtggacctcacagagcccatcatctcacgctttgacatcctgtgtgtggtgagggacaccgtggacccagtccaggacgagatgctggcccgcttcgtggtgggcagccacgtcagacaccaccccagcaacaaggaggaggaggggctggccaatggcagcgctgctgagcccgccatgcccaacacgtatggcgtggagcccctgccccaggaggtcctgaagaagtacatcatctacgccaaggagagggtccacccgaagctcaaccagatggaccaggacaaggtggccaagatgtacagtgacctgaggaaagaatctatggcgacaggcagcatccccattacggtgcggcacatcgagtccatgatccgcatggcggaggcccacgcgcgcatccatctgcgggactatgtgatcgaagacgacgtcaacatggccatccgcgtgatgctggagagcttcatagacacacagaagttcagcgtcatgcgcagcatgcgcaagacttttgcccgctacctttcattccggcgtgacaacaatgagctgttgctcttcatactgaagcagttagtggcagagcaggtgacatatcagcgcaaccgctttggggcccagcaggacactattgaggtccctgagaaggacttggtggataaggctcgtcagatcaacatccacaacctctctgcattttatgacagtgagctcttcaggatgaacaagttcagccacgacctgaaaaggaaaatgatcctgcagcagttctgaggccctatgccatccataaggattccttgggattctggtttggggtggtcagtgccctctgtgctttatggacacaaaaccagagcacttgatgaactcggggtactagggtcagggcttatagcaggatgtctggctgcacctggcatgactgtttgtttctccaagcctgctttgtgcttctcacctttgggtgggatgccttgccagtgtgtcttacttggttgctgaacatcttgccacctccgagtgctttgtctccactcagtaccttggatcagagctgctgagttcaggatgcctgcgtgtggtttaggtgttagccttcttacatggatgtcaggagagctgctgccctcttggcgtgagttgcgtattcaggctgcttttgctgcctttggccagagagctggttgaagatgtttgtaatcgttttcagtctcctgcaggtttctgtgcccctgtggtggaagagggcacgacagtgccagcgcagcgttctgggctcctcagtcgcaggggtgggatgtgagtcatgcggattatccactcgccacagttatcagctgccattgctccctgtctgtttccccactctcttatttgtgcattcggtttggtttctgtagttttaatttttaataaagttgaataaaatat

SEQ ID NO: 293 - DNA, 605 bp, Homo sapiens
  Genbank Accession No. D23662
gaagtggcccttgcaggcaagagtgctggagggcggcagcggcgaccggagcggtaggagcagcaatttatccgtgtgcagccccaaactggaaagaagatgctaattaaagtgaagacgctgaccggaaaggagattgagattgacattgaacctacagacaaggtggagcgaatcaaggagcgtgtggaggagaaagagggaatccccccacaacagcagaggctcatctacagtggcaagcagatgaatgatgagaagacagcagctgattacaagattttaggtggttcagtccttcacctggtgttggctctgagaggaggaggtggtcttaggcagtgatggaccctccattttacctctttaccctgtcgctcataatgaggcatcatatatcctctcactctctgggacaccatagccactgccccctcccctggatgcccagtaatgtatgtctactggtgggagactgtgaggatcccaggattcagtattcctggcccagagggccttgctggctactgggtgttagtttgcagtcctgtgtgcttccctctcttatgactgtgtccctggttgtcaataaaatatttcctggc

SEQ ID NO: 294 - DNA, 996 bp, Homo sapiens
  Genbank Accession No. D28137
gtggaattcatggcatctacttcgtatgactattgcagagtgcccatggaagacggggataagcgctgtaagcttctgctggggataggaattctggtgctcctgatcatcgtgattctgggggtgcccttgattatcttcaccatcaaggccaacagcgaggcctgccgggacggccttcgggcagtgatggagtgtcgcaatgtcacccatctcctgcaacaagagctgaccgaggcccagaagggctttcaggatgtggaggcccaggccgccacctgcaaccacactgtgatggccctaatggcttccctggatgcagagaaggcccaaggacaaaagaaagtggaggagcttgagggagagatcactacattaaaccataagcttcaggacgcgtctgcagaggtggagcgactgagaagagaaaaccaggtcttaagcgtgagaatcgcggacaagaagtactaccccagctcccaggactccagctccgctgcggcgccccagctgctgattgtgctgctgggcctcagcgctctgctgcagtgagatcccaggaagctggcacatcttggaaggtccgtcctgctcggcttttcgcttgaacattcccttgatctcatcagttctgagcgggtcatggggcaacacggttagcggggagagcacggggtagccggagaagggcctctggagcaggtctggaggggccatggggcagtcctgggtgtggggacacagtcgggttgacccagggctgtctccctccagagcctccctccggacaatgagtcccccctcttgtctcccaccctgagattgggcatggggtgcggtgtggggggcatgtgctgcctgttgttatgggttttttttgcggggggggttgcttttttctggggtctttgagctccaaaaaataaacacttcctttgagggagagcaaaaaaaaaaaaaaaaaaaaaaaaaaaaaaaaaaaagaattccaccaca

SEQ ID NO: 295 - DNA, 124 bp, Homo sapiens
  Genbank Accession No. D28423
attttcgtggacgccgggtgagtgagagagttggttggtgttgggccggaggaaagcgggaagactcatcggagcgtgtggatttgagccgccgcattttttaaccctagatctcgaaatgcat

SEQ ID NO: 296 - DNA, 792 bp, Homo sapiens
  Genbank Accession No. D28589
ggagttgcgcgggctgacgcgccactatgtagcgggtttcgggcgggccacgcgtgcgggacaggaacccaaccccagccgaccttgagctccaggagttcgtctcttacgtctgcggaagtgcagctgcctcagttcttagcgcaggttgacaactacaggcacaagccattgaagctggaatgtcctgttgctggtatttcaattgacttaagccaactatcccttcagttacaataggaaagtgcctctaataaggccaaatatgcgtactaacttgtagcaaccacgtgtccgtgcagtgccacaggagctagagcagtgacaatgctggtggcaacagggcagtgtagcaggtgcttcatgttcaccttttcaaccttttcatttaattgtcacaactcggaggtggattctgttagggacaggctgccccaggaccactccgcccccgctaactcaatgcagctgacccttaccctgaatactctgcagctgcattcctgaaccgttatctaggcgctatagcaaggtcaccagacttgctacaccgaagccctctgggtggcacgggggaggtcatgagaaacgtggattacacccccttgtaaattcctattttcacaagataatatattgtaagccggtcatgagattatatgtggtaaagttaattgactaacaaccccagggtctctctcccccatataaacccctcattttgtaagctcagggctgccacctccgactggtggagaagcctggcaggttaataaacttacttggcctgac

SEQ ID NO: 297 - DNA, 4080 bp, Homo sapiens
  Genbank Accession No. D29805
gcgcctgcggcgccgcgggcgggtcgcctcccctcctgtagcccacacccttcttaaagcggcggcgggaagatgaggcttcgggagccgctcctgagccggagcgccgcgatgccaggcgcgtccctacagcgggcctgccgcctgctcgtggccgtctgcgctctgcaccttggcgtcaccctcgtttactacctggctggccgcgacctgagccgcctgccccaactggtcggagtctccacaccgctgcagggcgggtcgaacagtgccgccgccatcgggcagtcctccggggacctccggaccggaggggcccggccgccgcctcctctaggcgcctcctcccagccgcgcccgggtggcgactccagcccagtcgtggattctggccctggccccgctagcaacttgacctcggtcccagtgccccacaccaccgcactgtcgctgcccgcctgccctgaggagtccccgctgcttgtgggccccatgctgattgagtttaacatgcctgtggacctggagctcgtggcaaagcagaacccaaatgtgaagatgggcggccgctatgcccccagggactgcgtctctcctcacaaggtggccatcatcattccattccgcaaccggcaggagcacctcaagtactggctatattatttgcacccagtcctgcagcgccagcagctggactatggcatctatgttatcaaccaggcgggagacactatattcaatcgtgctaagctcctcaatgttggctttcaagaagccttgaaggactatgactacacctgctttgtgtttagtgacgtggacctcattccaatgaatgatcataatgcgtacaggtgtttttcacagccacggcacatttccgttgcaatggataagtttggattcagcctaccttatgttcagtattttggaggtgtctctgcttcaagtaaacaacagtttctaaccatcaatggatttcctaataattattggggctggggaggagaagatgatgacatttttaacagattagtttttagaggcatgtctatatctcgcccaaatgctgtggtcgggacgtgtcgcatgatccgccactcaagagacaagaaaaatgaacccaatcctcagaggtttgaccgaattgcacacacaaaggagacaatgctctctgatggtttgaactcactcacctaccaggtgctggatgtacagagatacccattgtatacccaaatcacagtggacatcgggacaccgagctagcgttttggtacacggataagagacctgaaattagccagggacctctgctgtgtgtctctgccaatctgctgggctggtccctctcatttttaccagtctgagtgacagctccccttggctcatcattcagatggctttccagatgaccaggacaggtgggatattttgcccccaacttggctcggcatgtgaattcttagctctgcaaggtgtttatgcctttgcgggtttcttgatgtgttcgcagtgtcacccaagagtcagaactgtagacatcccaaaatttggtggccgtggaacacattcccggtgatagaattgctaaattgtcgtgaaataggttagaatttttctttaaattatggttttcttattcgcgaaaattcggagagtgctgctaaaattggattggtgtcatctttttggtagttgtaatttaacagaaaaacacaaaatttcaaccattcttaatgttacgtcctccccccacccccttctttcagtggtatgcaaccactgcaatcaatgtgtcatatgtcttttcttagcaaaaggatttaaaacttgagccctggaccttttgcctatgtgtgtggattccagggcaactctagcatcagagcaaaagccttgggtttctcgcattcagtggcctatctccagattgtctgatttctgaatgtaaagttgttgtgtttttttttaaatagtaggtttgtagtattttaaagaaagaacagatcgagttctaattatgatctagcttgattttgtgttgatccaaatttgcatagctgtttaatgttaagtcatgacaatttatttttcttggcatgctatgtaaacttgaatttcctaagtatttttattctggtgttttaaatatggggaggggtattgagcattttttagggagaaaaataaatatatgctgtagtggccacaaataggcctatgatttagctggcaggccaggttttctcaagagcaaaatcaccctctggccccttggcaggtaaggcctcccggtcagcattatcctgccagacctcggggaggatacctgggagacagaagcctctgcacctactgtgcagaactctccacttccccaaccctccccaggtgggcagggcggagggagcctcagcctccttagactgacccctcaggcccctaggctggggggttgtaaataacagcagtcaggttgtttaccagccctttgcacctccccaggcagagggagcctctgttctggtgggggccacctccctcagaggctctgctagccacactccgtggcccaccctttgttaccagttcttcctccttcctcttttcccctgcctttctcattccttccttcgtctccctttttgttcctttgcctcttgcctgtcccctaaaacttgactgtggcactcagggtcaaacagactatccattccccagcatgaatgtgccttttaattagtgatctagaaagaagttcagccgcacccacaccccaactccctcccaagaacttcggtcctaaagcctcctgttccacctcaggttttcacaggtgctcacaccacagttgaggctcacacacaggtctgtctgtcacaaacccacctctgttgggagctattgagccacctgggatgagatgacacaagacactcctaccactgagcgcctttgtccaggtgccagcctgggctcaggttccaagactcagctgcctaatcccagggttgagccttgtgctcgtgtcggaccccaaaccactgccctcctggtaccagccctcagtgtggaggctgagctggtgcctggccccagtcttatctgtgcctttactgctttgcgcatctcagatgctaacttggttctttttccagaaggctttgtattggttaaaaattattttctattgcagagagcagctgtgactcatgcaaaaagtattttctctgtcagatccccactctataccaaggatattattaaaactagaaatgactgcattgagagggagttgtgggaaataagaagaatgaaagcctctctttctgtccgcagatcctgacttttccaaagtgccttaaaagaaatcagacaaatgccctgagtggtaacttctgtgttattttactcttaaaaccaaactctaccttttcttgtttttttttttttttttttttttttttttggttaccttctcattcatgtcaagtatgtggttcattcttagaaccaagggaaatactgctccccccatttgctgacgtagtgctctcatgggctcacctgggcccaaggcacagccagggcacagttaggcctggatgtttgcctggtccgtgagatgccgcgggtcctgtttccttactggggatttcagggctgggggttcagggagcatttccttttcctgggagttatgtaccgcgaagtgtgtcatgtgccgtgcccttttctgtttctgtgtatcctattgctggtgactctgtgtgaactggcctttgggaaagatcagagaggcagaggtggcacaggacagtaaaggagatgctgtgctgcctacagcctggacagggtctctgctgtactgccaggggcgggggctctgcatagccaggatgacgcctttcatgtcccagagacctgttgtgctgtgtattttgatttcctgtgtatgcaaatgtgtgtatttaccattgtgtagggggctgtgtctgatcttggtgttcaaaacagaactgtatttttgcctttaaaattaaataatataacgtgaataaatgaccctaactttgt

SEQ ID NO: 298 - DNA, 300 bp, Homo sapiens
  Genbank Accession No. D31134
cccgcccgacaccagctgttgtccacttcaaggtgtcagcccagggcattacactgacggacaaccaaaggaagctcttctttcgccgccattatccagtgaacagcatcaccttctccagcactgaccctcaagaccggagatggaccaacccagacgggaccacctccaagatctttggtttcgtggccaagaagccgggaagcccctgggagaatgtgtgtcacctctttgcagagcttgacccagatcagcctgctggcgccattgtcaccttcatcaccaaagttctactgggcc

SEQ ID NO: 299 - DNA, 2104 bp, Homo sapiens
  Genbank Accession No. D42073
gctgttgtcgctcgctcagcgtctccctctcggccgccctctcctcgggacgatggcgcgcggtggccgcggccgccgcctggggttagccctggggctgctgctggcgctggtgctggcgccgcgggttctgcgggccaagcccacggtgcgcaaagagcgcgtggtgcggcccgactcggagctgggcgagcggccccctgaggacaaccagagcttccagtacgaccacgaggccttcctgggcaaggaggactccaagaccttcgaccagctcaccccggacgagagcaaggagaggctagggaagattgttgatcgaatcgacaatgatggggatggctttgtcactactgaggagctgaaaacctggatcaaacgggtgcagaaaagatacatctttgataatgtcgccaaagtctggaaggattatgatagggacaaggatgataaaatttcctgggaagaatacaaacaagccacctatggttactacctaggaaaccccgcagagtttcatgattcttcagatcatcacacctttaaaaagatgctgccacgtgatgagagaagattcaaagctgcagacctcaatggtgacctgacagctactcgggaggagttcactgcctttctgcatcctgaagagtttgaacatatgaaggaaattgtggttttggaaaccctggaggacatcgacaagaacggggatgggtttgtggatcaggatgagtatattgcggatatgttttcccatgaggagaatggccctgagccagactgggttttatcagaacgggagcagtttaacgaattccgggatctgaacaaggacgggaagttagacaaagatgagattcgccactggatcctccctcaagattatgatcacgcacaggctgaggccaggcatctggtatatgaatcagacaaaaacaaggatgagaagctaactaaagaggaaatattggagaactggaacatgtttgttggaagccaagctaccaattacggggaagatctcacaaaaaatcatgatgagctttgatagacactcaccagaatatggcagactgtcataggcattctgttattgtcttggattgttgctacaattgtctaattacagcagttgtgatcccacaaaaagcaagtttatacctcagattggggtataaaaattgtttttcgctcagtatttactggaaaatggacatcactagtctttcagtaagatttctctcaaaacacgtgaaaaccttggtaaattgcaattctttctggggatatattggtacaacatgacttaaaacttttttttttctattaaaacttaaaggggaacaaaacttgaaaaagccctgttcttcagaaggtgagtgggttgagggaggcagtaatatgaagtgactgctgtgtattttaactaccagatttttatatttgccactgttagatagttggaaaggggaaattctgtttaagcgaaagtggtatcatcctaggtaagcttatttcagaacaagtctaatatatcagattctttcttttcgactttatactctgagttattacttactgtaagtggtgtatatgaaacctccatgcattttccagtatggatctgctaatatgcacagtaaatccatgtctttgtttgtttttctattaagaagcaatcaagaaagataatgtgaaaaagaaaggaatttagaggtagggaaaagatgaatgtcagacatgtgaagaactatagtaaaaatgataaaccacctaaatatccttgaacctaccttaaaatgccaatgaggtaggcctgatctttgaatagtggctaggatacaatgcatttcctcagtgatcactgattagaatgagttggtgggatccttgggaagccaaacggagcggggttctggatcatgtcccatccagtccagtgaatccccgacccgcagacctgccccccccgcaacagcttataccatggaatgaggacaaggtgatactctgagctgtggactgaactggcagacacaacctgtacagattgaaatttcaccttgtaaggaggaagtgaatgaaataaaggatccccctaagg

SEQ ID NO: 300 - DNA, 419 bp, Homo sapiens
  Genbank Accession No. D45370
ctcttgacgactccacagataccccgaagccatggcaagcaagggcttgcaggacctgaagcaacaggtggaggggaccgcccaggaagccgtgtcagcggccggagcggcagctcagcaagtggtggaccaggccacagaggcggggcagaaagccatggaccagctggccaagaccacccaggaaaccatcgacaagactgctaaccaggcctctgacaccttctctgggatcgggaaaaaattcggcctcctgaaatgacagcagggagacttgggtcggcctcctgaaatgatagcagggagacttgggtgaccccccttccaggcgccatctagcacagcctggccctgatctccgggcagccaccacctcctcggtctgccccctcattaaaattcacgttcccaccctgaaa

SEQ ID NO: 301 - DNA, 3233 bp, Homo sapiens
  Genbank Accession No. D50928
tgcgactgagtcggtggcgaagacgggaacgcgacgatggcggagactctgcccgggtcgggcgactcgggccctggcacggcttctctcggcccgggcgttgcggagactgggacgaggcggctcagcgagctgcgggtgatcgatctgcgggcggagctgaagaagcggaacctggacacgggcggcaacaagagcgtcctgatggagcggctcaagaaggcggttaaagaagaggggcaagatcctgatgaaattggcatcgagttagaagccaccagcaagaagtcagccaagagatgtgttaaaggactgaagatggaggaggaaggcacagaagataatggcctggaagacgattccagagacgggcaggaggacatggaagcaagtctggagaacctgcagaatatgggcatgatggacatgagtgtgctagacgaaactgaagtggcgaatagcagtgctccagattttggggaggatggcacggacggccttctcgattccttttgtgatagtaaagaatacgtggctgcacagctgagacagctcccggctcagcccccagagcatgctgtggatggggaaggatttaagaacactttggaaacttcatcgttgaacttcaaagtaactccggacattgaagaatcccttttggagccagaaaatgagaaaatactcgacattttgggggaaacttgtaaatctgagccagtaaaagaagaaagttccgagctggagcagccatttgcacaggacacaagtagcgtggggccagacagaaagcttgcggaggaagaggacctatttgacagcgcccatccggaagagggtgatttagatttggccagcgagtcaacagcacacgctcagtcgagcaaggcagacagcctgttagcggtagtgaaaagggagcccgcggagcagccaggcgatggcgagaggacggactgtgagcctgtagggctagagccggcagttgagcagagtagtgcggcctccgagctcgcggaggcctctagcgaggagctcgcagaagcacccacggaagccccaagcccagaagccagagatagcaaagaagacgggaggaagtttgattttgacgcttgtaatgaagtccctccggctcctaaagagtcctcaaccagtgagggcgctgatcagaaaatgagctcttttaaggaagaaaaagatataaagccaatcattaaagatgaaaaaggtcgggtcggcagcggttctggtcggaacctgtgggtcagcgggctgtcctccacaacacgcgctacggatctcaagaaccttttcagcaagtatgggaaggttgtcggggccaaagtggtaacgaacgcccgcagcccgggggctcgatgctatggattcgtcaccatgtcgacatctgacgaggcgaccaagtgcatcagccatctccacagaactgagctgcatggacgaatgatctccgtagagaaggccaaaaatgagcctgctgggaaaaagctttccgacagaaaagagtgcgaagtgaagaaggaaaaattatcgagtgtcgacagacatcattctgtggagatcaaaattgaaaaaactgtaattaagaaggaagagaagattgagaagaaggaggaaaaaaagcctgaagacattaagaaggaagaaaaagaccaggatgagctgaaacccggacctacaaatcggtctagagtcaccaaatcaggaagcagaggaatggagcggacggtcgtgatggataaatcgaaaggagagcccgtcattagcgtgaaaaccacaagcaggtccaaagagagaagctccaagagtcaggatcgcaagtcagaaagcaaagaaaagagagacatcttgtcgtttgataaaatcaaagaacaaagggagagagagcgccagaggcagcgggaacgggagatccgcgaaacggagaggcggcgggagcgcgagcagcgggagcgggagcaacgcctcgaggccttccatgagcggaaggagaaggcccggctacagcgggaacgcctgcagctcgagtgccagcgccagcggctggagcgggagcgcatggagcgggagcggctggagcgcgagcgcatgcgcgtggagcgtgagcgcaggaaggagcaggagcgcatccaccgcgagcgcgaggagctgcggcgccagcaggagcagctgcgttacgagcaggagcggcggcccgggcggaggccctacgacctggaccgacgagatgatgcctattggccagaaggaaagcgtgtggcaatggaggaccgatatcgtgcagactttccccggccagaccaccgctttcacgacttcgatcatcgagaccggggccagtaccaggaccacgccatcgacaggcgggagggttcgaggccaatgatgggagaccaccgggatgggcagcactatggagatgaccgccatggccacggaggacccccagagcgccacggccgggactcccgtgatggctgggggggctacggctccgacaagaggctgagtgaaggccgggggctgccccctccccccaggggtggccgtgactggggagagcacaaccagcggctagaggagcaccaggcacgcgcctggcagggtgccatggacgcaggcgcggctagccgggagcacgccaggtggcaaggtggcgagaggggcctgtctgggccctcggggccggggcacatggcaagccgcggtggagtggcggggcgaggcggctttgcacaaggtggacattcccagggccacgtggtgccaggtggcggactggaaggtggcggagtggccagccaggaccggggcagcagagtccctcacccacaccctcatccccccccgtacccccacttcacccgccgctactaagtcccactcgctgtgagttttcgggtgggcagacgcactgttgaatctggtagccagggttccctcgaacttgggggatctttttaaaagcaaagtaaatcctgccaccatgttgtagctcaatacaatgtgaactcacttttttttttttttttaataaatgtgttcttgttctgccatttttaaatcaaggtttctgttaacgaggcattccattttccattaataaagtttaccattcgcaaaaaaaaaatgtgttcttgttctgccatttttaaatcaaggtttctgttaacgaggcattccattttccattaataaagtttaccattcgc

SEQ ID NO: 302 - DNA, 404 bp, Homo sapiens
  Genbank Accession No. D51060
actttyccaatagtttwatttgtatttttctttaaatatccttttctggaatttttcagaaacaaaacataaaaaaattatatactttattacaaatkggaaactcagagtgctccaaatctcttatttacaaacaacactgggcaggatacccaaacaaacaaacaagaaatwcttacaaaggcatgaagctgtttattgacagtaatcagctttcatcaaattaaaaaatatatatwtbtwcatacacagttaacgaggcaggccagaaagagttyatctgtaggctcagcctcgctctcacctcgtgccgaattcctkcagcccgggggayccactagttctagagcggccgccaccgcggtggagctccagctttttttccytttagtgaggggtaattg

SEQ ID NO: 303 - DNA, 283 bp, Homo sapiens
  Genbank Accession No. D51069
ctgggacaattaagctttatttttcatatatatatatayyyycatatatatatatacatacatatataaagggaacaatttkcaaatttacacaactgacaaaaccatatatacacacatatgtatgcatacacacagacagacacacacacccgaagtctctagccaggcgccgtttymcatcccyaagtaccattctctcatttgggcccytctagggktggggcccycgtgccgaattcctkmagcccgggggatccmctagttytagagcggccccacc

SEQ ID NO: 304 - DNA, 347 bp, Homo sapiens
  Genbank Accession No. D60074
  unsure (1)..(347): n = a or c or g or t
gtaaaaactggtttatttttttaaaaataaatacaaaaatataaatvtannnnnntvgcagatagamttygatgaaatgaaattgcacaaatgtctgtataccaggttgcatatcacacctactaacatcacatgtacatttttgtttttttaatttaatgtacagaacaggatatactgtaaaabtyttcttcacctttttaaaagcttcatttgcaagggcaggvcatgtacctaacagaagcggcttgtttgtgaggttgcttaagggrgaactatcctgttcatgtttctgaaattatcttttatttactaagrtggacaacactgtatttccatagctttgg

SEQ ID NO: 305 - DNA, 293 bp, Homo sapiens
  Genbank Accession No. D60755
cgttcgttaaatctttattgaygcgtggacactcctbcccctccagccccgccccccagccccagaaatactagaaagcgcaccataaaacgagggcacgagattgtbgtcccattcacgacggagctgagggggaggtgtgcaggttccagcctagatgttcaggattgagatgtgggtcgtgaaaggaaagtgggttttccgggatgtgggggcttttctvagcactgggtccactgacgctgctgytcccaaggggatgctaggacyccgytcaggcaggggtgggctcg

SEQ ID NO: 306 - DNA, 354 bp, Homo sapiens
  Genbank Accession No. D62584
catttttaagcatttgcttctgttttccctacctagaatgtcagatgtttttcagttatctccccatttgtcaaagttgacctcaagataacatttttcattaaagcatctgagatctaagaacacaattattattctaacaatgattattagctcattcacttattttgataactaatgatcacagctattatactactttctcgttattttgtgtgcatgcctcatttcctgacttaaacctcactgagagcgcaaaatgcagctttatactttttactttcaattgcctagcacaatagtgagtacatttgaattgaatatataataaatattgcaaaataaaatccmtct

SEQ ID NO: 307 - DNA, 482 bp, Homo sapiens
  Genbank Accession No. D62965
aaaatatctcattaaaaagcccataaataataggggagaagaaagccttaggtatcaattccaaaacagtgattgaaatttcccaaaataattatggcttctgtcatctccagagataatctggcttggtttaccccataatctaatttcagaaaagaaagctttattttaacactcatctgaatcaacattaaagccttttctctcaaagcgtttattgagaaactcaaatgaatatactttttgaattactgtcatcaaaagtgtacggcttcctgtgctgcttgtgtcaaatggaacctgccctctaaagcactttctttcctttacttgcgtggtttcatgtaagctgtgctgtttagaacaacatctcagactttacaaagaatgacaagaaggcaattgcactttttagggatatcgccaagcagtttctgttttctaaaggccaaaatacagagtgtgtgtcatttttattagat

SEQ ID NO: 308 - DNA, 383 bp, Homo sapiens
  Genbank Accession No. D80059
gggtctgtgagccaataaaactttatttacaaaagcaggcgacaagtcagaccyagcctgattgggccttgttttccaacccttagactgcatccactttgagaaaagtyttgtcaaaagcatcattttagcgctttcttttagaggcagggtcctgacaactcttgattaacacacacatccaggcactttgtytctyttcctccgttgtcctttkataaacaccaactggcagaggggacatggagcattttttcttcaattgcagtgattctttkagggaaaggggccytcaggagcattgttcacattctccgbyttgtcctgggaggcagttagaggatgtkgtcactccagaataatttwttkaktcacatacttyt

SEQ ID NO: 309 - DNA, 328 bp, Homo sapiens
  Genbank Accession No. D80063
agtttttattmggaattgtccattgaatgttagctaaaacagtcaataaaaygcattamgtgccagctgcatgcaagcccctamgttagatacaatcmgccctcttcatcagcaggtccacatcttcmgattcaactmgaygcggctgaatatttgamggaagaaaaaataaaaatacaaatmgaamgawacagtataacaacygttkccattatacaatatctatacatttcgttagtgatgacttcaagtacaygggaccaggcacggtgactcacacttgtatyccaacacttcggaggscaacctgggagsatagtgagacctt

SEQ ID NO: 310 - DNA, 377 bp, Homo sapiens
  Genbank Accession No. D80237
ccycatgcagccccaaagggvaaaaagrgactttaattaggggagggaggatccaccagaatcagaaaagggacagytagcgtgggagcagaggrgccagaacaggcaggrggrgggcccggccaggaagytytggrggactcacctcgccacctytggcacaggcactggcactgacggacaaggsgaaacagcggcccctctcaactgggrgggcaccaatggcccctgtagccagaggttgcccggcttttgggccccaggtcctaggcatgactggtggtcaccaatttggcccttktccccaaccagtgctggggggccatctttaggcagaactcaggaagcctcgtsccgaattcctgcagcccggggga

SEQ ID NO: 311 - DNA, 295 bp, Homo sapiens
  Genbank Accession No. D80617
aacaaacaattgtgtttattgacaagttcatacatcagtacaaacgggcacgttaaaaacagcgcccccgccccatgcagccgaggatgaggcaggaagcgccgcgacctgcacaaagtataaaagttataaataaggggctttcaaaacagggcgggggcaaatctggagtggggcggcggttgccggtggcctcagacatgcagaaggggacggggcgccggccgggccacgaggccccccacccacatggggcagagggcaggaaaagggcggccacattctcctcgtgccg

SEQ ID NO: 312 - DNA, 313 bp, Homo sapiens
  Genbank Accession No. D81655
tctgccccgaagccctcgcgaggccctcctggaggcccccgtgctggtggagtttgggggccagggggacaagttgccttctctctctgccctggtcctccctgctgtctggatggtgctgccctcctctgccccatgcctttggggtctgttcgtccgtcttttttgttgttgtttttatatattgaagcgcctggcccagcccccagccccccagccccgcactgsggttaatttatgtgttgtttaaaatgcggctgctctgcttcctgcctctgcttctgccsgatccchaawaaaatgkgggggcccc

SEQ ID NO: 313 - DNA, 1425 bp, Homo sapiens
  Genbank Accession No. D82346
cgcggagcgaggtggccgcagcgtctccgcgcgcggcccaagcccggcaggagtgcggaaccgccgcctcggccatgcggctcccggccggggggcctgggctggggcccgcgccgccccccgcgctccgcccccgctgagcctgagcccgacccggggcgcctcccgccaggcaccatggtgcagaagtcgcgcaacggcggcgtataccccggcccgagcggggagaagaagctgaaggtgggcttcgtggggctggaccccggcgcgcccgactccacccgggacggggcgctgctgatcgccggctccgaggcccccaagcgcggcagcatcctcagcaaacctcgcgcgggcggcgcgggcgccgggaagccccccaagcgcaacgccttctaccgcaagctgcagaatttcctctacaacgtgctggagcggccgcgcggctgggcgttcatctaccacgcctacgtgttcctcctggttttctcctgcctcgtgctgtctgtgttttccaccatcaaggagtatgagaagagctcggagggggccctctacatcctggaaatcgtgactatcgtggtgtttggcgtggagtacttcgtgcggatctgggccgcaggctgctgctgccggtaccgtggctggagggggcggctcaagtttgcccggaaaccgttctgtgtgattgacatcatggtgctcatcgcctccattgcggtgctggccgccggctcccagggcaacgtctttgccacatctgcgctccggagcctgcgcttcctgcagattctgcggatgatccgcatggaccggcggggaggcacctggaagctgctgggctctgtggtctatgcccacagcaaggagctggtcactgcctggtacatcggcttcctttgtctcatcctggcctcgttcctggtgtacttggcagagaagggggagaacgaccactttgacacctacgcggatgcactctggtggggcctgatcacgctgaccaccattggctacggggacaagtacccccagacctggaacggcaggctccttgcggcaaccttcaccctcatcggtgtctccttcttcgcgctgcctgcaggcatcttggggtctgggtttgccctgaaggttcaggagcagcacaggcagaagcactttgagaagaggcggaacccggcagcaggcctgatccagtcggcctggagattctacgccaccaacctctcgcgcacagacctgcactccacgtggcagtactacgagcgaacggtcaccgtgcccatgtacaggtaccgccgccgggcacctgccaccaagcaactgtttcattttttattttccatttgttcttaaaccccactttttgttgttcattattttgattgattttttttctttaaaatgtatttttcacaaagg

SEQ ID NO: 314 - DNA, 493 bp, Homo sapiens
  Genbank Accession No. D82534
  unsure (1)..(493): n = a or c or g or t
aagcagtatgcctgtttgcacgatttaactaacaagggcattggagaagaaatagataatgaacacccctggactaagcctgtttcttctganaatttcacttctccttatgtgtggatgttagatgctgaanatttggctgatattgaanatactgtggaatggagacatagaaatgttgaaagtctttgtgtaatggaaacagcatccaactttagttgttccacctctggttgttttagtaaggacattgttggactaaggactagtgtctgttggcagcagcattgtgcttctccancctttgcgtattgtggtcactcattttgttgtacaggaacagctttaanaactatgtcatcactcccanaatcttctgcaatgtgtagaaaagcagcaaggactagattgcctaggggaaaagacttaatttactttgggagtgaaaaatctgatcaagaaactgggacgttgttacttcctgtttcctcca

SEQ ID NO: 315 - DNA, 3198 bp, Homo sapiens
  Genbank Accession No. D83018
ttgggaggagcagtctctccgctcgtctcccggagctttctccattgtctctgcctttacaacagagggagacgatggactgagctgatccgcaccatggagtctcgggtcttactgagaacattctgtttgatcttcggtctcggagcagtttgggggcttggtgtggacccttccctacagattgacgtcttaacagagttagaacttggggagtccacgaccggagtgcgtcaggtcccggggctgcataatgggacgaaagcctttctctttcaagatactcccagaagcataaaagcatccactgctacagctgaacagttttttcagaagctgagaaataaacatgaatttactattttggtgaccctaaaacagacccacttaaattcaggagttattctctcaattcaccacttggatcacaggtacctggaactggaaagtagtggccatcggaatgaagtcagactgcattaccgctcaggcagtcaccgccctcacacagaagtgtttccttacattttggctgatgacaagtggcacaagctctccttagccatcagtgcttcccatttgattttacacattgactgcaataaaatttatgaaagggtagtagaaaagccctccacagacttgcctctaggcacaacattttggctaggacagagaaataatgcgcatggatattttaagggtataatgcaagatgtccaattacttgtcatgccccagggatttattgctcagtgcccagatcttaatcgcacctgtccaacttgcaatgacttccatggacttgtgcagaaaatcatggagctacaggatattttagccaaaacatcagccaagctgtctcgagctgaacagcgaatgaatagattggatcagtgctattgtgaaaggacttgcaccatgaagggaaccacctaccgagaatttgagtcctggatagacggctgtaagaactgcacatgcctgaatggaaccatccagtgtgaaactctaatctgcccaaatcctgactgcccacttaagtcggctcttgcgtatgtggatggcaaatgctgtaaggaatgcaaatcgatatgccaatttcaaggacgaacctactttgaaggagaaagaaatacagtctattcctcttctggagtatgtgttctctatgagtgcaaggaccagaccatgaaacttgttgagagttcaggctgtccagctttggattgtccagagtctcatcagataaccttgtctcacagctgttgcaaagtttgtaaaggttatgacttttgttctgaaaggcataactgcatggagaattccatctgcagaaatctgaatgacagggctgtttgtagctgtcgagatggttttagggctcttcgagaggataatgcctactgtgaagacatcgatgagtgtgctgaagggcgccattactgtcgtgaaaatacaatgtgtgtcaacaccccgggttcttttatgtgcatctgcaaaactggatacatcagaattgatgattattcatgtacagaacatgatgagtgtatcacaaatcagcacaactgtgatgaaaatgctttatgcttcaacactgttggaggacacaactgtgtttgcaagccgggctatacagggaatggaacgacatgcaaagcattttgcaaagatggctgtaggaatggaggagcctgtattgccgctaatgtgtgtgcctgcccacaaggcttcactggacccagctgtgaaacggacattgatgaatgctctgatggttttgttcaatgtgacagtcgtgctaattgcattaacctgcctggatggtaccactgtgagtgcagagatggctaccatgacaatgggatgttttcaccaagtggagaatcgtgtgaagatattgatgagtgtgggaccgggaggcacagctgtgccaatgataccatttgcttcaatttggatggcggatatgattgtcgatgtcctcatggaaagaattgcacaggggactgcatccatgatggaaaagttaagcacaatggtcagatttgggtgttggaaaatgacaggtgctctgtgtgctcatgtcagaatggattcgttatgtgtcgacggatggtctgtgactgtgagaatcccacagttgatcttttttgctgccctgaatgtgacccaaggcttagtagtcagtgcctccatcaaaatggggaaactttgtataacagtggtgacacctgggtccagaattgtcaacagtgccgctgcttgcaaggggaagttgattgttggcccctgccttgcccagatgtggagtgtgaattcagcattctcccagagaatgagtgctgcccgcgctgtgtcacagacccttgccaggctgacaccatccgcaatgacatcaccaagacttgcctggacgaaatgaatgtggttcgcttcaccgggtcctcttggatcaaacatggcactgagtgtactctctgccagtgcaagaatggccacatctgttgctcagtggatccacagtgccttcaggaactgtgaagttaactgtctcatgggagatttctgttaaaagaatgttctttcattaaaagaccaaaaagaagttaaaacttaaattgggtgatttgtgggcagctaaatgcagctttgttaatagctgagtgaactttcaattatgaaatttgtggagcttgacaaaatcacaaaaggaaaattactggggcaaaattagacctcaagtctgcctctactgtgtctcacatcaccatgtagaagaatgggcgtacagtatataccgtgacatcctgaaccctggatagaaagcctgagcccattggatctgtgaaagcctctagcttcactggtgcagaaaattttcctctagatcagaatcttcagaatcagttaggttcctcactgcaagaaataaaatgtcaggcagtgaatgaattatattttcagaagtaaagcaaagaagctataacatgttatgtacagtacactctgaaaagaaatctgaaacaagttattgtaatgataaaaataatgcacaggcatggttacttaatattttctaacaggaaaagtcatccctatttccttgttttactgcacttaatattatttggttgaatttgttcagtataagctcgttcttgtgcaaaattaaataaatatttctcttacctt

SEQ ID NO: 316 - DNA, 217 bp, Homo sapiens
  Genbank Accession No. F01920
  unsure (1)..(217): n = a or c or g or t
aacagggataggcaaacagctctttattccaactccattagtgatatgaaagaaagacaatccaagtcagtaatggaaatatgcaagangttcaatttaggtgaggtgaatttttgcatgtgctttaacggttgaggtttagtgtatattgtactttttacccttaaggccaagtaattggcaactgtgaaccattaatgtaaaatattgataataa

SEQ ID NO: 317 - DNA, 205 bp, Homo sapiens
  Genbank Accession No. F02204
caggagaagcctgtttattaggcaggagaagcagcagggcagccaggctcccctcccagccaccagctggccaaatgtcctcccttaactcaggggtacccaaggctccatggccatgtgaccagaggcgtgtaccctcaagaggcggcccctcagccctgggcagcccagccactgggtctcgcccttcaggggcctgcgcccc

SEQ ID NO: 318 - DNA, 298 bp, Homo sapiens
  Genbank Accession No. F02245
gggggtggcagtgcactttattaacaaacaaaacagtaccatacaggcaaaatcttacttcagtggcaaagcacacacataggtatactccaacgtgtagcactggggcaaacttcagacatggaacattaggcaccaagttcacaatcacactaaacatagttcacaatccttcaatccatactcttcagtggaggatgaggccttatttaacagttaactgggacagacagatgaagttttaaaatctaattcttggcctaactgtggagtggggctgactcagccttcagaactg

SEQ ID NO: 319 - DNA, 212 bp, Homo sapiens
  Genbank Accession No. F02333
gcattaacagtaaccccaagaaaggcatcagggttctggagtggttgtttgagtgacacagcacaaggccttgatttcatcatgcttttgctgtggatgtagtgtagcttgctgaacaggtatggaagctgtctttgctgttaagtacttctcccgtttgtttatcaacctgcagctaacaggatgtctgcttttttacaggtttatttcac

SEQ ID NO: 320 - DNA, 221 bp, Homo sapiens
  Genbank Accession No. F02470
gtttcacatgagtgaaaaaattaacagctgccctcatttctgaaaacaaaaaactataaacaatcactgttgctcccaatgggaccgttggacataagccctgaggctttggggtcaacgggctagactctagaagcccaggaccccgccaaggtcatgtctgcatacttggggcagggcgagctgttgaaccatcgcatttctctgctgcttctttacat

SEQ ID NO: 321 - DNA, 312 bp, Homo sapiens
  Genbank Accession No. F02992
  unsure (1)..(312): n = a or c or g or t
aagaattttagtttttttcttcccccagactttttttttttttttttttttttttttaaggaaaaaaacccccgccaaatctgaaccgcgttgtagctcggtccccgcctcctcagcgggctgtcgcgtgcaacaaacctcccccatcatcttagaaaataattatagagcgcggcgccccgccctcgntcctgccagtgggcgntttggtcctattttttggattatttcattacgaagcacgtgaatgaatctagcccccacaccttcaagaaagaaactcgcggactggggttgaaaagcccaggtggg

SEQ ID NO: 322 - DNA, 202 bp, Homo sapiens
  Genbank Accession No. F03254
  unsure (1)..(202): n = a or c or g or t
attcatggtcgantattatttattgtcagaaaggtacagcattcacaccaatatcagacaaaatagattttaactaaaaaattatttcgngacaaaaataacaatatatgtnaataaaaggctcaattaaaaatgtataacaattataaacacatacacatcaaacaacagtnccccaaaatacataaagcaaacattgaca

SEQ ID NO: 323 - DNA, 305 bp, Homo sapiens
  Genbank Accession No. F03969
  unsure (1)..(305): n = a or c or g or t
gaactttgggaaaattatttatttctccccacggggttcagacaagtaatttcacatttcattgtaagtcaagggtaagaaaacattttttgtacatccatcactaatagagatcacagtatgtcaatgaaatatttaaatacactgtacagagattgctttttaatggatttctataagtagtattaataggaaaaagcatataatacaatctactctgtatctaagagctttaatttattcaaatattggaagaaattcatctnctgaattttncttatttaaaaagcattatgagaactgat

SEQ ID NO: 324 - DNA, 335 bp, Homo sapiens
  Genbank Accession No. F04112
aatagagatgggggatctcatcgtcacccaggttggaatgcagtgataccatcacagctcgctgcagcctccacctcctgggatcaacccctacctcattctcctgactgggactacaggcactcaccaccacactgggctaattaaaaaaaaaaattcttttttgtagggaagtggtcttgctatgtcacccaggttgatctagaactcctgacctcaagtcacccgtccgcattatcctcccaaagtgctgagattacagacgtgagccactgcacttggcctatttagggcttctaattcactttccttttccttcttgtctaattcttgtg

SEQ ID NO: 325 - DNA, 178 bp, Homo sapiens
  Genbank Accession No. F04492
gtagagacggagccatccatgtttcccaggctggtctcgaactcctgggctcaagcaatcctgccgcattggcctctcaaagtgctgcgattacaggtgtgagccattgtgcctggccaaaatgtgtatttttaatatgctgctgagttgactcttgtatgatcaggaggagcatttg

SEQ ID NO: 326 - DNA, 211 bp, Homo sapiens
  Genbank Accession No. F04816
  unsure (1)..(211): n = a or c or g or t
gatgtaacatttgtnattttattggaaaaagctggtattaacatatttatagttttattcaacaattgggtaatttgtgagacaccaaagaaaaaaagaatgcacctatgagttacagagtccaaactgatcagggctgacaacttgaccaccatgtntcccacaccaccacccccaccaccaccaccaccaacagcttcgtcctcagaga

SEQ ID NO: 327 - DNA, 276 bp, Homo sapiens
  Genbank Accession No. F09281
  unsure (1)..(276): n = a or c or g or t
actgtttaaatataattgaagtttttnatatgatgaagtgctccataatttaaatgtaaaaaaccaataggaaatatatgaaataaaataaaattatacgtaaaagtgacaatgcctctattagatttaacagtatcttacaatagaataagttgaaacctacaaaatggaagaaagtttaaaattaggcagatattatcancctggtgaagaataaatacatatgtcaataagcatttaatgtatttggtcttagattttacatgaaataataaa

SEQ ID NO: 328 - DNA, 293 bp, Homo sapiens
  Genbank Accession No. F09315
acagaaattgacctttatttgttgtactaaagcctgtttaacttttgatacaaagtaacattttagtacagaaaatcccagtctgtcagctcagtacctgtctgtgcacactgtaccatctcagtcccactctgcctgtaacttagaaaacagcccctacccccagaggtctgcgagttaataccttgagaatagtctacagtttttcatagtttgtctgagctagaaaacttgtacctgtaaaacaaaggacagcattgaggactgaaacttgtctcttttttgaacaactg

SEQ ID NO: 329 - DNA, 214 bp, Homo sapiens
  Genbank Accession No. F09684
gctttacataaacttataaggattttttatttaaaggatttaaaaatataacacagtcaatataaacatgtactgggaattataaaccattctttcttctaagcactggatgagatactaaaaacatacagtatcttaccaatagccattaaaataggctaaaatgaaaaagaaaccgttgtaacaaggttactaatcccccaactttcaatgc

SEQ ID NO: 330 - DNA, 332 bp, Homo sapiens
  Genbank Accession No. F09748
gaatgaaagaatccagcagatatttattaagcaagatgaaagtgaaattacaaacacaggtcaacttttaaactcagcactctgttggagtggaggtgcacggtccttcatcataggcagcctatgcgagatgcatcttaggaagggagctttcgctgctcagaaatcaaagctccatcggaggtgtcctactggaggcatcagacaacaagctaaatgacgttagggctacacaacacaaaggggaaagttgacaacaattcaggggctttgagtagtcaagacaattagcttagtacttcaggtcaataaatgctacaatttatgggcaa

SEQ ID NO: 331 - DNA, 247 bp, Homo sapiens
  Genbank Accession No. F10078
  unsure (1)..(247): n = a or c or g or t
catgccttgaggaaagctatttatttccaagatatagactgtacttttaagacaggacttttcagaagcaggaaattttagttgttgccagagaggtgtgtcaaggacacagtgaaaggagccatgcggacatggggtggaaggctttntccaacactgttacaacacttttgtaaatgagcaaaacatctttaaaaatccttataaattctttataatatgttacacatttagagacaatatttac

SEQ ID NO: 332 - DNA, 243 bp, Homo sapiens
  Genbank Accession No. F13763
ttttttttttactttaatttttcttttattttcactgacagaaaaattttctggagagtacaatcaagatagtgtattattagaaataacattaatagaagcttggtcagaaatgataatagtcataataagcatctctctcaccaaggcattccacacagagagatcacagcacaataaataaaggatttctcatttgccacacaacaaataaaacaattgcagtaacaaaaatatgacttt

SEQ ID NO: 333 - DNA, 415 bp, Homo sapiens
  Genbank Accession No. H01824
  unsure (1)..(415): n = a or c or g or t
attcacaanaannnnttttattattcttaacagtactcactttaaaggaataagaggatagcatacattttttacagacaatatataaatgttgtacataattaacaataacttagttcactaatccaaaataaaacaagccaaataaaacataaaaacagaaaatactgccgnttctttttcttatgcgggacactagntacaaaataagttacttctgggccgtgggtgctccctgcaggcgactgcccgcccatattgcacttgggtcactaacatcaggcacaatcctcctccgggggccggggccccttcancagggcccaccacaccccgccgttcaccggcattacaggaatcttaggcttgggggacaggtttattattacagctgttaccttggggggnggggttc

SEQ ID NO: 334 - DNA, 309 bp, Homo sapiens
  Genbank Accession No. H02308
  unsure (1)..(309): n = a or c or g or t
tgatagcacattttagtttttaataaaatctgctttttacttatatttaaataaattgcccagttactgaatcagaagcatttcttacaaagcaaacaaaataagcatcccttctatgttaataacatgttaatagtatgttggcaagttgatttagaacaacttgccaacaatacaaacagaaaaaaggagtgggtcaaagaaatctagtttggctttattttcaatagatcatactgtctgttgaaaaaggaataaataattatggagcctatctaataatatactcaatagnttgaaattattgag

SEQ ID NO: 335 - DNA, 277 bp, Homo sapiens
  Genbank Accession No. H03387
  unsure (1)..(277): n = a or c or g or t
acgcaagttagannanttattatgataactctgcaatcttttcagccactctttaaggttcctgggcatccattctgggcacagtgtgacatttacctgaacagagaggagantggcactagaagatgagggagatttggtgcctaaaaattactacaaacaggcagggtgcagtggctcacgcatgtaatcccagcactttgggaggccgaggtgggtgcatcacgaggtcaggagtttgagatctgcctggccaacatggtgaaaccccatctct

SEQ ID NO: 336 - DNA, 372 bp, Homo sapiens
  Genbank Accession No. H05084
  unsure (1)..(372): n = a or c or g or t
ttttttttttttcacagtgagcattaaattattattccatacagccctggccctggcccttcttgagggagtggggtttntggggtntgcccagcagggatcctgccagatgatgtccacatgagaaggcaggtgtccaacagcttcagcttcacccagtgccccccagacaaataatgacaagtccagggtcttctgatgtgtcaggccagcactccccttgctgatgggaaaaccggggctcggccagccccactgcatcccctcacatgatgatacgaggctctngcactgactcgccaatagacttgtggggcagcangctggctccgttgaggtaggagctcatcattaactattgacgtcctncac

SEQ ID NO: 337 - DNA, 353 bp, Homo sapiens
  Genbank Accession No. H05625
  unsure (1)..(353): n = a or c or g or t
ttttttttttttttttttttgcttcacaaatgtcaattttattgacactagtgcacaactaaatacaataattgcaaaggaagtggaacgtgttcaaacagaaatggtgacaatgagttagaactgcagttntttcaaggtactacactattatttaaaaaaaaaatcacaaanagaaaaatgttatcactacaagtagggatttaggaagngagnaaattctgggcagtctgtctagnagggttaaaacatttcatggcatttgtgagttgctgttggagagttgttttttatttgtccaccgtaatctgggcaacatccgggggcttaccttcagctctcggcactgtgcg

SEQ ID NO: 338 - DNA, 501 bp, Homo sapiens
  Genbank Accession No. H05704
  unsure (1)..(501): n = a or c or g or t
tttttttttccttctgtagtcgtctttatttagagcagaattcagactcagctggtatcccccagggcaaccccaggatgggganagggctggtctgtccccacccacttctccaggatcctcccagcccccaggctgncttttccctccaactgtcagctgcttagctgctcatctggggattggagctggagcatctgtcaaggttgtctccttgacaaacagcttcctctttggaaatggcttcactcaggtcctgcaggtcatcgagcaggacagagagggacccggggaaggaagacagcagatgagcaccagacaagggaaggtgctcgtggttacagagggaaacagggttgggcacagggaaatgagggaatggggagagagggaggctctttgggtccaagctggggcatcncttaaaagaggtttaagggtntcgaaggaccncagagaacaacattcttcntgcgagatttttaagagggagttttctna

SEQ ID NO: 339 - DNA, 465 bp, Homo sapiens
  Genbank Accession No. H08548
  unsure (1)..(465): n = a or c or g or t
ttttttttcacaaatattggcttggtttttatttctatgcttataaaaaaaatatgaagcttctttgtgtggactgaaggggtgttagcctgtggatgttggtcttcggtgcctgtaccccagtggctgtttacattccaggnccctgctaaataaagnaggctccactgccagctgtctgtacactttttcttgggggaagagttcttgtcttcagtttactgcagtagggttcctggctctgttacatgctcatgtgttccggaagaacatatgaaatatcatcccacggatgacgatacagcccctgcttcagcctnttctgatcaagatagtntccaatgaaccccatactccttcccagcacaaagatgccattgagggctccaatgtcaatattattgcatcagcttcctcccgagtaaagggacccacagttttttaaggatgttttacaattgcgat

SEQ ID NO: 340 - DNA, 313 bp, Homo sapiens
  Genbank Accession No. H15143
tttttttttttgtgggtcacagttgagggtttattgccagtgttaggaagaatggggggtctgggtggccaggggtcttgggaggaattccaaatgagcactgcagggcctgtgagtggggaggagagctgctgcccccctgccacccaggaggccccagggctgatgccaccatatcctgactgctagtggtgccttaaaaggtggcctccccacaggaggggagccttgggggcccccaggagtcagccctcaccaacaagccctctctcaagggggccaggggcttttattcctcatgggacaggctggg

SEQ ID NO: 341 - DNA, 295 bp, Homo sapiens
  Genbank Accession No. H16171
  unsure (1)..(295): n = a or c or g or t
tttttttttttttttttaaattaaacacccntatgantttattaaatccagaactgtgttaaagggcggcggtctncgagggggagtntggtagggggacgagggacaagatgatgaacggccgtgggcatcccntagggngacccggnccacccccgcccaacccaccccctcngcaacgctgcatcagcttcaccatgattcccagtggtgctgggctgggcagggcgagatggctgggaaacacagagggacagagggacagacagacgccttccacaaacaaaccctggnc

SEQ ID NO: 342 - DNA, 389 bp, Homo sapiens
  Genbank Accession No. H16676
tttttttttagttttgtggtactacatatgttttattaaaaattcaaactttttttcagatcgaagcataatttatcttccattaacaaaaacgaagatcttaaatttgacacgattacaattaaaatgctgaaaggagttatgaggcatttaaatcattcttcaattagaatgtttgcagcatatttctcagaggctgacctggaacacattacctttgttggcaggcatcaaaggcaggataaatcctgtggctggaaatcaattgtgagtcccattaggatgactttctaggcacacatgcatagggtcttgcactgtatccgttctacttctaggaaggttgctgtctggaaggctctttcccctgggcgaggtcactttcccgg

SEQ ID NO: 343 - DNA, 471 bp, Homo sapiens
  Genbank Accession No. H16768
  unsure (1)..(471): n = a or c or g or t
tttttttttaatttataaaaatgaaaagtttatttgtctcatggttctgacaggctgtacaagaaacatggcaccaacatctatttctggtgagggctttaggctgcttccactcatggtagaaggcaaaaaggagctggcatgtgcagagatcacgtagncaagagaggatacaaggagatttccaggnctctttttaacagtcagctctcatgagaagtaatagaggaagnaagtcacttactactgagagagtggctccaagccattncataaggaatcaaccaccatgacacactagggcctcacctccaaaactggggaatcacatttcaacatgaggatttgggaagggtcaaatatccaaactataggcattctacccctggaacgcctaagtatcctgtccttctcacaaggcaaattacattattttattcccattagtttcccgaaaacttaacttgtttt

SEQ ID NO: 344 - DNA, 354 bp, Homo sapiens
  Genbank Accession No. H17333
  unsure (1)..(354): n = a or c or g or t
tttttttttaattgttaatattgctaatttgtacaatggttaatgatcttataaaatagttgtatgaaagcaccaaccaccttagaaagtctgaccagcattcatatctactttccagaccctcatccctcctccccactcacctgactctgctcggctcattcatgggctttcctgtgctctgccattgctcaggtgagtgagcagttcgcccggcacattgaccaggcagatccagggcanccgatcggtggagcccaggaaatggagaggctggcacagctgcagcaatgcctgnaagctgtcctgattttctccggcttngagatagccaccacttttgagcattattac

SEQ ID NO: 345 - DNA, 486 bp, Homo sapiens
  Genbank Accession No. H17550
  unsure (1)..(486): n = a or c or g or t
ttttttttatttttaaaaatctatttatttatcaaaacagtattggcacagtaattctcatattatcatcaaataataaaattgctactttctgtactcaattctttagaatcctagaaattgcaaatgcattcaatttaacaatattgtaaataacaatacaaaagaaagaactctgcatatttatggaaacattgttgatggtacagttctactgaaactcatacacatttcactatttaatttacatatggncttgttgaaaaaaaccagtatgttttactttttcaatttccttatggctaaaatacatgtaattctaaagggatatctcttgggtgttataaaaaccagggagggtccaccaccaggtcaaggttggngtcaaggntacttcaaaggttccctggaatggatccggaaaacaaattttaacccnaaaatgtggtaccgntttgggggggcccttcncgggccccccaacgg

SEQ ID NO: 346 - DNA, 371 bp, Homo sapiens
  Genbank Accession No. H18947
  unsure (1)..(371): n = a or c or g or t
ttttttttttctttttttaggnttcatgtttgttttatttaaagtctggttgggtacagaaaacacacacacacttaacaggttaaaatatccaaataaaatttactgcaacttttgtagaattttatttgtgctacaagacacgttgcataagaaactatttaaagcccctgaggaaaaaatatccatggtttaaggtgcaactggttttgtttcttctttggggaaaaggtgatagatggtctctgggagaaattatggggtggagttgagaagcacaatcgaaggttatatggtgggatgattggcgaattgtgtgtcctgggttcttggcagcattaaaatagcctaatgttttgttctttttttca

SEQ ID NO: 347 - DNA, 187 bp, Homo sapiens
  Genbank Accession No. H21814
  unsure (1)..(187): n = a or c or g or t
ttattgagggtttattgagtgcagggagaagggtcttgatgccttggggtgggaggagagacccctccccgggatcctgcagtctctagtctcccgtggtggggggtgagggatgagaacccatgaacattctgtaggggccactntcttctccacggtgctcccttcatgtcgtgacctgggcagc

SEQ ID NO: 348 - DNA, 432 bp, Homo sapiens
  Genbank Accession No. H22453
  unsure (1)..(432): n = a or c or g or t
ttctcttgttgctggagttgtaaaaatcaatgtcccattgctgagatcgaagctccctgtgtctctggggggctcagcagggacgatggcctccagagtggacctctgagaaattgcagaggcatcagagctgtgggctcagcatatgaggtccccaggggccatagaccccctcctcctgggaagagtgctcctgcagagcttatttgcaatctcctgggagtcccagactcaccaaaggattcagatcctcttctttttgcctcctacatagagcacattatagacctgaaacaggaatcagaattccagactcccttagtgaggagacaaagtgttaggtcttagctttttcccttctaaattaagggtcctccctgggattcaggttgcctgatagcttatncctgaaantggtnggagatagggaaa

SEQ ID NO: 349 - DNA, 233 bp, Homo sapiens
  Genbank Accession No. H26288
aaaaacaccagtttgaaacacattactgaaagtgagtgtacacaataaatagaaaatagggatgcatagtgctggagacattcaaccaacttatcttcatctgttgcctactgttgtagacaaaatttgacacacaattagcattactgaaagagcagccaaactacctcggagaaagtgggcaaactactggaaaagtagcttaaagctctgggaccactcaccaaaaataa

SEQ ID NO: 350 - DNA, 290 bp, Homo sapiens
  Genbank Accession No. H27180
  unsure (1)..(290): n = a or c or g or t
aggntttattttggaccaaaaaaaaaaccacaattgttttctagctggaagantgggcaaggggggtcccagacagtaaactcccccacgggtgggttgagcctcaggtggggggtctcctgttgtctgtgcttccccacacagcagcctccctcctggngtctgtggcagccacgggaggggcagactaggaggagctgccacagttnttcacttgggcaggaagtcagaggactcagacaccagcttcccatcgcgggtntcgatcttcttnanaaccacggccctgg

SEQ ID NO: 351 - DNA, 292 bp, Homo sapiens
  Genbank Accession No. H27675
  unsure (1)..(292): n = a or c or g or t
gtgtctccatggcgagtgggagcgtgaagatgaccagctttgcggagaggaagctccagagactcaacagctgtgagaccaagtccagcaccagcagctcccagaagaccacgccagatgcgtctgagagctgcccagcccctctgacgacgtggaggcagaagagggagcagagtccgagccagcatggcaaaggntcccgccagcctcctggcatctgagctggtacagtggcacatgcantcgaaggagaagcgcagggccatcgaggccaggaagaagaagatggagg

SEQ ID NO: 352 - DNA, 327 bp, Homo sapiens
  Genbank Accession No. H40424
  unsure (1)..(327): n = a or c or g or t
ctgtatantttnncttnttttttctcttgtgatttggcacttaaggcttaagcgcnaaaaaaaaaggcatctactgacaaaatatgggacttgtctgtnatgcatggtaagtgggctataaaatccagggagggggtttcaagccagaagaagctactgacaaattgacttgtccttatgttaggtggggttatgagggggagagggagggcacattctgaggtgctgggggaaaggggttgagcttaaccttgttaatgtagggcctgtggggaatgggatgggtagggagaagagggtatgggatgtgggtgcagggtaggggct

SEQ ID NO: 353 - DNA, 448 bp, Homo sapiens
  Genbank Accession No. H44631
  unsure (1)..(448): n = a or c or g or t
actcagcatncnttttattttnctatctgacatttctaacaaaacgccagggagacggagttaaaaagaatccaccccacgaaaggtaaacaaaggagaccctcagaaactccctggcaaggatgttcccctccccagattgggcccagtttcaccagcaactgggtctcagactcagccttatgcctttccactgacaccccccacccctccacantctcgtgattcagaccagggaacttctcgggctgattgtgtccgtgtgtctgagggaggggcacgctggaacctgggaacctactgggcacctctaatgcagatgagaaaaacttgagaatgtgaaaggagatcagtccccgntcccacccgaaggtgcagagacgcgggacattaaccagcagnacgcgggggtgaaggaactcagggcaatttctcccantgccagggg

SEQ ID NO: 354 - DNA, 346 bp, Homo sapiens
  Genbank Accession No. H48793
  unsure (1)..(346): n = a or c or g or t
gatttaggagattccaagtgatacctttaattcactactctatgtccttattaataaatacatatttaaaaaaacctatacaatatagtgtatttacagcatggaagagcagagactctgaagccagactgcctgagttcaaatcctgacacttctactcaaatatgtgtgagtgactttgggcaatttacttactctttctgtgtttctatttactcgtctacaacaataatttctacctcatcaaattaaattaaaaaaaaaacggcttaaataggttaacatttgtaaataggcttaggaaaacactacatttaaaaaaataancattcctaacccaccttcc

SEQ ID NO: 355 - DNA, 458 bp, Homo sapiens
  Genbank Accession No. H49440
  unsure (1)..(458): n = a or c or g or t
ggagtttcaccatgttggccaggctggtctcaaactcctgacctcaggtgatccacctgcctcagcctcccaaagtgctgggattacaggcatgagtcattgctcccagccattagaaagattgttaatcctatgaactcccttttgtaggagagaaagggccaatctgtaggggtagccctgtccaggtaaagttgttttcagcctcatgtctactgttaggtgagggagtcacagccagacagagagtattgctggagggtgagagaattgtggagaccaactaccacatagcaagagcccagctcttgggagcattgagatgtaagctcagggttacacagttccaaatcttggggaaggggctttttcagacagactgtttgctttctgctgagattaaggaattgcatcantctgccagagtattgactttttaacagattattaaataaagg

SEQ ID NO: 356 - DNA, 446 bp, Homo sapiens
  Genbank Accession No. H52835
  unsure (1)..(446): n = a or c or g or t
cggataccctgggggcctctgctcctctctttgtggagacgtcgtttcaccggcggcgcgtgaccccggcagctgtccagagacccagagatgtccaatcacaggcgcacggtgcacaggcgcgcagggctgcctggaacgggcccaggcaggcagtgaccgggacctctccggagggagaggaacggtgccctcccgggaggagctggccaggcaggcgctgcccagggcggccttccctgctggactacggcattgcnactgagttatataaagacactatttggggaaggacagcgggtgaggactnggcgcggcggcacacgctttgcctgttgtnttcagctcttctgggggccaaggcagggagttccagggtttacagtgagcctgatngccaattgctttccaaaagagagaaacagagagaaagggattnaggcttc

SEQ ID NO: 357 - DNA, 386 bp, Homo sapiens
  Genbank Accession No. H54764
  unsure (1)..(386): n = a or c or g or t
gatggagtttcgctcttcttgcccaggctggagtgcaatggtgcaatctcggctcactgcaacctccacctcctgagtttgagattctcctgcctcagcctcccactgggattacaggcgcctgccaccacgcccagctaattattgcatttttagtagagatggggtttcaccatgaaaatttttatttttattaaaagagtgcatgagttagtcatgaaggcagagccagggcggcctgcataccaaatgtgaaggaacagtaccaattgacaaaggaaggcacaaaactaggacaaaggaaaagggacttcaattaaataaggtaatttggaactaactggaaaattgaggagggggaaatngcaaataaaatnggggaggca

SEQ ID NO: 358 - DNA, 384 bp, Homo sapiens
  Genbank Accession No. H56673
  unsure (1)..(384): n = a or c or g or t
gttaccaagacacaattttaagatcaaacaagtgtcaaggtaggccatggcttgttggcagtagtaggggccctatggctatttccaggtatgggtggccccttttccttggttatctggggaatctgccacagcagacagcaaaaggtaaaaagcatccctttaataactacaccccactccagcaattgaggtttattcaggggtgggtcaaagtagtacaagacaaaaatagcttagtgaaatggnttagaatccagactgaggtgccagactgcctgcatctgaggtctcaggtcccaccatgtatggaggccgtgtggaccttgggggtgaggttactaggcctccccggggtttcaaatcttcttcacctgtaaaatg

SEQ ID NO: 359 - DNA, 440 bp, Homo sapiens
  Genbank Accession No. H58873
  unsure (1)..(440): n = a or c or g or t
actataacttagtgtctgtatttaatattgacaaccaaaaatatatatanttttnttgcatctatacacaacagggcaggagtctccatgtnttcttgagcagtgagtttgcaggctcccacaggccctcttctcatggtaatagtgtggccctagtgcaaaggagactagaacccggcagcccagactggcccttcccctctcctccctgcactccagtgcttcccaactggtctcaggtaaagaaagnttantttgagtggttgggtaggaagagatgggaaggggcaaatcctaatgggagcctgacccctagagtggggagttccagggccagcagaacgggtgggccatagccctncctggggntagaagctttgtagttcatagttcgattagtntgtccntagggcatnaggtnccagccctacagattagct

SEQ ID NO: 360 - DNA, 284 bp, Homo sapiens
  Genbank Accession No. H60595
aagacagagtggactgttacaaatgattttgcaaaatacaaaaatagatatacttccactgaatgctttaatcatttttccgggcactctcatcttttggttcttcctcatctgagtacacagtgggctcctccccctccttcagcagtttgcccacgtgatgatacttgaaagtgaactgagactcccagtcactcagagtctcctgctgggcgcagtgaggtcagaaaggtcatcgtactcatccttcagtgcttccttatccggggaaaatgtgggcaagg

SEQ ID NO: 361 - DNA, 317 bp, Homo sapiens
  Genbank Accession No. H61295
gaaccctctaagggacctcaaaggtgattgtgccaggctctgcgcctgccccacaccctcccttaccctcctccagaccattcaggacacagggaaatcagggttacaaatcttcttgatccacttctctcaggatcccctctcttcctacccttcctcaccacttccctcagtcccaactccttttccctatttccttctcctcctgtctttaaagcctgcctcttccaggaagacccccctattgctgctggggctccccatttgcttactttgcatttgtgcccactctccacccctgctcccctgagctgaaa

SEQ ID NO: 362 - DNA, 370 bp, Homo sapiens
  Genbank Accession No. H64493
  unsure (1)..(370): n = a or c or g or t
gggtgctttatttccatgctgggcgcccgggaagtatgtacacggggtacgtgccaagcatcctcgcgcgaccccgagagcccggggagcgggngcttgccggccgtcgcactcatttacccggagacagggagaggctcttctgcgtgaagcggttgtgcagagcctcatgcatcacggagcatgagaagatgttcccctgctgccacctgctcttgtccacggtgagcttgctgtagaggaagaaggagccgtcggagtncagcatggggaggcntgggtnttgtagttnttctccggctgcccgctgctttcccantccacgggcgatgtcgctgggggtagaagcctttgaacagggaagtcaggc

SEQ ID NO: 363 - DNA, 460 bp, Homo sapiens
  Genbank Accession No. H66642
  unsure (1)..(460): n = a or c or g or t
ttaaagacagagtttcgctcttgttgcccaggctgtagtgcaatggcgcgatattggctcactgcaacccctgcctcccaggttcaagtgattctcctgcctcaccaagtagctgtgattacaggtacccgccaccatggccagctaattttttctatttttagtagagccggggtttcaccatgttggccaggctggtctcgaactcctgatctcaggtgatccacctgtcttggcctcccgtgctgggattataggcatgagccaccacgtccggccaaattttacttcttaaaagtgcttttctctcagtgatatcaaggtcttctgtctactattataaccataagcttctttaggcattaaggagggaaaatgtttaataaaatgtaattaaactgggatggaatggtcagtgtatttaaatgtaaatatacttaaatgtaattaccggggnggt

SEQ ID NO: 364 - DNA, 291 bp, Homo sapiens
  Genbank Accession No. H68097
  unsure (1)..(291): n = a or c or g or t
tgaagtttatttnctctggcagtatgttttagtttcttgtttttnattttgttgtgtgtgtatgtgttgtagattttatgatttgaggttaccatgaggcttgcaaataacataacatgttattttaaagtgacaacttgacactgattgcaaaaacaaacagggcgaagagaactaataaaaactgtacactttaacttcattcctcctgtttttnaaggtttttatgggtttctatttatatctccttgtactattttgaaaagggnattgcaggttatcatttgttca

SEQ ID NO: 365 - DNA, 317 bp, Homo sapiens
  Genbank Accession No. H77597
  unsure (1)..(317): n = a or c or g or t
tcaagtctaagtgtttaattattattcacatatttcacagaaaaaaaggaatgtagcaaatgagtcggagttgtagaaaaaaaaaatcctggnttttacgtgtcattctgttttcatctgacagcagggctgtcccgacatcaggcacagcagctgcacttctctgacgcccctttgcagatgcagccctgggcacacttgggcacagcccaggggnaaacaggagcagcagcctgggggaaaaagggagagagaaggtcacaggcagacttnaccagggganctccctttcccaacagcaggcctgggctcaagct

SEQ ID NO: 366 - DNA, 340 bp, Homo sapiens
  Genbank Accession No. H81070
  unsure (1)..(340): n = a or c or g or t
caggtctaaagtgtttaattatcactcacatatttcacaggaaaaggaatgtagcaaatgggtcaaggtggtataaaaaaaaaatccaggtttgtacatgtctctctgtttacatctgggagaaaggttgtcctgggcatcagtcgcagcagctgcacttctctgacgcccctttgcaaacacagccctggggcacacttgctacagcccacgggnagncagggagcaggcagctctttcttgcaggagggtgcatttgcctctttgcacttgcgggaaccagcgcggtgcagggaggacaccagcggcgcagggagcagttggggggtccattngcaag

SEQ ID NO: 367 - DNA, 330 bp, Homo sapiens
  Genbank Accession No. H81379
  unsure (1)..(330): n = a or c or g or t
ttaannttttttaaaaccaaaagaacaactttaataagcttttacggcactgcaattacaggaacatcgacccataacatgcaacaaaaatgattttgccttttggacatatttaacagataaacttgacattacaagtaacagcaacacattcccattctactgaagaaaacaaatgcgatttaactttcaggttagaaaacgtatcttcttactgcaatctcaagtnggcatttngaaagtttagttttcccttttctaacctctaaaagatgatatgatttttaatgcaatcatacacaactgttttcacattggggaatantcacg

SEQ ID NO: 368 - DNA, 419 bp, Homo sapiens
  Genbank Accession No. H81413
  unsure (1)..(419): n = a or c or g or t
ngagccagaaaaggattttttttaattcaagtaactgaaataggaaaccagagggggagccccaggctgggataaatcatggctacccctccccaacagaacagggggaggaggtggcccctacacccattatggtcgattcgggcccccttgctcactctgctgcagcatcctagaggcagggccccaccttccctgggactggggtagtcggtcacccagcctgcattgccccagcccctnttccccacaaagagtatcttgggggagggnttcgtggggcagaacaggagggcaatgagggatgaacattgctcaaactcctttcaaaggggcacctgaccgcacaggggaggntgggcaggaagggcaagggntgggggatgccgtntaaggagggcggangcaggcanttttgg

SEQ ID NO: 369 - DNA, 386 bp, Homo sapiens
  Genbank Accession No. H83380
  unsure (1)..(386): n = a or c or g or t
ttaattgcagaaaaatttattaaattggaaaatcttgcgtttttcaatggcgctggccccgggtcagcggcgattttctctgcatcaagatgggctttgcgtttccgtagtgggcaccagtggtggcctgattgtcagtcttctcccggcatttttaaggccagggagccgaagcgctgcttgtaggcgaataccctacagagcggtttggctttttaaattactgttattattttgggcagagaacagtcggtctgggtgcaccccgtcctcgctgcagaagaggctgcgagtccgaggtggggtctctcgggaaggtgaaattccttctnggggntnagcgagccccggccccgcgcggcagtccagcggccccggtgttgttg

SEQ ID NO: 370 - DNA, 335 bp, Homo sapiens
  Genbank Accession No. H84761
  unsure (1)..(335): n = a or c or g or t
cggcactttattagtggggaaacncgccntggnctggcagagactgggatcaacaggaccngcacccatctcgaggnggtattttcngtaagancaggngttccnccctcgtaggtttagaggaaacaccctcatagatgaaaacccccccgagacagcagcactgcaactgccaagcagccggggtaggaggggcgccctaggcacagctgggcccttgagacagcagggcttcgatgtcaggctcgatgtcaatggtctggaagcggcggctgtacctgcgtaggggcacaccgtcagggacccaccaggggactttcttcaaagttccnggg

SEQ ID NO: 371 - DNA, 178 bp, Homo sapiens
  Genbank Accession No. H86112
  unsure (1)..(178): n = a or c or g or t
gcttaatggggccaaaggggcaacacaaagcattgaaaacatcactggctcacaaaaccagtcaccttgttaccttctcagttgcatttgtttatttcacaaggcttcattcacacataaaancaagatactantccaattcangttcataacggttataanggtaancatttgttgg

SEQ ID NO: 372 - DNA, 287 bp, Homo sapiens
  Genbank Accession No. H88338
atgcatgtttaaacatttaatctagaacttgattacaaagtaatttaatgaagaaaataatctgttataattcttatagatgtttattagtttttagatttaaaaaaaaaacagggcttataattaaagcaattgactaatgatctcacagcctcaaggttgtatgcaaacctagattagaaatactttggtctctaaaaataacaaaatggaccataacattttttttcttacaagtttgaagtgggtcaattatgggggaaacacatacattcctaaggggaaat

SEQ ID NO: 373 - DNA, 337 bp, Homo sapiens
  Genbank Accession No. H88798
  unsure (1)..(337): n = a or c or g or t
nactttaataagtataaagtatataaacaattaggtaagcttgtggagaagctgaccaagatacataaattaggaaatacaagtgtccatctaaattttctatatttcatttttttcataatatttattaaaggtgtttaatatacagtttctcatctgtcattttggaagtcctttattgtaaagacaattctattgtctgatgacaaacagcagccaccatggttattcaggacctccacgttggataaattccatttcttcttgagacacaagtttccttctggtatttctgaggtaatggnttttattatttctggcagtgtctggtggaccc

SEQ ID NO: 374 - DNA, 321 bp, Homo sapiens
  Genbank Accession No. H91703
  unsure (1)..(321): n = a or c or g or t
ccataagacaagtgacatatccaaccaaccatccatccccacctgtgccctattctttccttgtgtttctttagagccttttcagctatttcctgtgaagcaaactgcacgaaggcctcccccgtactcctcccctggaagtccaccggcaatgttatcccatttggcacgatttccaacccttcaacccaaggacaaataaccccagtagggggncaatattaacatcacaagcccagnaaatgattcttcttataggctttaaataaaccaggactttttaactttagggtgaatgggtatgctttcaacaagtactct

SEQ ID NO: 375 - DNA, 395 bp, Homo sapiens
  Genbank Accession No. H94471
  unsure (1)..(395): n = a or c or g or t
tttgttacttttacatgatctttattatttaagaaaaacctcttttaaccatttatataacagaaaaaaaatagggaggctggtagatcatcacatatatagtagctaaaatatgaaaggccagggaatttattattaatgaagtcataaaacagacttaaccaaaagtgtgtgctaggaaacaagcagtttcacttcagagacttcattgcaggaacccagtttccttatgtggaaaaaagtgattataaataacagttatctgaaaggtggttgagaggattaaatgagatcacctatgcaaacaaatacatgtaggtatgaaagaccatccgtcctgggggtngtggaaagtttaagtttccccnccagaacccttccctttaagggcctta

SEQ ID NO: 376 - DNA, 373 bp, Homo sapiens
  Genbank Accession No. H94475
  unsure (1)..(373): n = a or c or g or t
tttttgcccattcattctttattcaggtggcataaaaatcactacaaaaaccttacaaaagagccttaaggagctcatgggatccttccctgcctcggttcctgagctcccgggcagaggagggagacaggagaggaaggaagggaaatgctggcagtgttgggatctcgaggagccgtgggaagtctggcgtgacaaggcacagggggtaggatggaggctgatggactctcggcaggttaggccacagccaaggctgtgccangacacgagttccacgcggggctgaggacaacgcttcgcctcccgagccaccaccagggcccgtctctccccaccctaagcctaggtgtcccgggacaagtccaaaggc

SEQ ID NO: 377 - DNA, 417 bp, Homo sapiens
  Genbank Accession No. H95960
  unsure (1)..(417): n = a or c or g or t
ttttattgttttagtaatcttaacataacttaaaataagagaggggaaatgacatctggagatctaggtatgtggcccattgcaattgagcacatttcttgggtctgtttctctatctctaagggcagtctcaaaaccccagctcaaaatacgacactaacatgatgaacatgcatgagctttgaaaagtgctctgtagtcttatgatgatctagaagagcactgtccaatagaactttctgtgatgatgaaaagattctacttctgacctattcaatagggtaaccactaatcatgcatggctctcaagcacttgaaatgttgctagtgtgattggggagctgcgttttgaatgttaacnaatttanattttaaatcnttaaaaagtttacatgtgggttagtgggncgccgtacg

SEQ ID NO: 378 - DNA, 439 bp, Homo sapiens
  Genbank Accession No. H97538
atttttgtagttttgggcaaaacattcactgttctgtttcagcatatttccttggaacatcttcatctctttccattttgcggacactccccttcttctattctcctttactcaaaacatatggtttagacccacatcatggctttcttgtgggaagcctggatgggactaggaaaacacatgtttccaacatggtgcatatctgtttgtgcagatatcagacaagatttaatcttgtctaacttatgcgtattgttttgatgtttgcctgtggttattctgggcacagcaatggtggacattattgaaaatgaactttattggcagatgaaagataatagaacatgaagatttatgaactaccataagctctgcatctctgggtcttcatttccaaagcagcacttggaaaaccaagcccagtttcaggcaaagagtt

SEQ ID NO: 379 - DNA, 440 bp, Homo sapiens
  Genbank Accession No. H98835
  unsure (1)..(440): n = a or c or g or t
caagatcctgcctcccaagcctataagctttaccaggagagaggcaggccccaccccaagatccactatccactctttgaagaaagattagagccatgttctcagactttgggctgcatcctaatccctgcgaagtgcacaatgtgtgatgactccaccctccacccgatccagagggtctggggtgagacccaaggctgagaggcctcgatggcttcctggccccatctccggcagcagctctatggctgggctctcctgcaggctgggtgcaccccaggccctcagatggttctaaccagaatcgatgggcagcagtgacttcgactgtatcatcaatcttggctgccacaaggttgggttgtccaggccctcagcttganccttggaggtggggcccccacacagagctttgtctgcccccagcccaccctcattta

SEQ ID NO: 380 - DNA, 495 bp, Homo sapiens
  Genbank Accession No. H99035
  unsure (1)..(495): n = a or c or g or t
tgagctttggacaaatttattgaaacatacaggcggctgttagcagagaaatcattccatgattgatgtgttacatttggccactaccttgaatgtataatttaaaaattatatttttcacaactaagcctttgncaaaaaagtcatttagcacatctttaaagatcaataagaaatggattttggacattaaaaagatcaagtcactgaattaaacagtagcaacccccattaatctagaatcccatagtgctgaaggtagaggtgtctgtgcaaagctagtcatttgttaacagcaatcagaagangatgggggcaggcacacctgtcagaggtggcagcagactggcaggacaggacggctgggctggtctggtcaggtgagcatgtcccagagacagcagcaacagagagccgtccagcaggctgtgaggcaggtggatggtcctagctcatctcctccttgggtcttctaccacatacactgtgggnttt

SEQ ID NO: 381 - DNA, 424 bp, Homo sapiens
  Genbank Accession No. H99648
  unsure (1)..(424): n = a or c or g or t
ggggtatataattttattttaagtttatatttcctgcaggatagcaacatacatcttttcctacccagaggcaaaatacattttccaaaaacgtggacactgcccactgcattaagtttaaagtgctccctatatatatagacagtaaaagtaagcaaagaaacttacaacacattccaatctttaatatctcaaaaatgtttccaaggcaacattattaaaataattataccacagtccctaatataacatcaagctccagtaggaaggtacagagagggcaggaagtttccatccagtctggtttaggtgctcttcttttcttcacccagtaaattcacggtagctttcttcgcttctttagtgatggcatctgcagtccccttggccntgtctttaagggtccctgaccacactggtccat

SEQ ID NO: 382 - DNA, 438 bp, Homo sapiens
  Genbank Accession No. H99694
  unsure (1)..(438): n = a or c or g or t
attttnatatatgtatatatttattatgtcacaaatagctacatactggataagccagaaagatgaggaaacatgtttgcatctcacactagtgcagagattctgaaaaagaccccacttggaataccaaaccacacattagattgttctgttcccaattgtgtgccaaagtgcactctgaactgttttggtaaagccgaccgtggagtcatatgaggctgaataacttgggagaatgtaagtctgcaaaataaacctaggactggattgatcctcaggccacttggcaggtgaatgtctcgggagtgaatatgagacaagcttcctgaaaaggcttatatgacttaaagaactttttgtttaagtgtttggtcccaaataaactattaagatatataaagtaattcactgctcaaaaattaccgtcagataaatatn

SEQ ID NO: 383 - DNA, 749 bp, Homo sapiens
  Genbank Accession No. J00073
taggtaagtggagaggttccattttaataatagaatatatctttaataatataaatgatgaaatagaggtgagttcatataacttgattggccatattatttcgtggtatgacatatcccacattatagcgaattaatatctaatggtttttctgtgaatcctcccaatgtgttatttgctcccttgcttggaacttcagagttcactggaagtttttgttttcttctgcagattattgctccccctgagcgtaaatactctgtctggattgggggctccatcttggcctctctgtccaccttccagcaaatgtggattagcaagcaagagtacgatgaggcaggcccatccattgtccaccgcaaatgcttctaagatgccttctctctccatctaccttccagtcaggatgacggtattatgcttcttggagtctcccaaaccaccttccctcatctttcatcaatcattgtacagtttgtttacacacgtgcaatttgtttgtgcttctaatatttattgctttataaataaaccagactaggacttgcaacctataaaagcctctcgtttgtttttggggtaggcgtggggtggggcaggtgtttgctttgacaccctgagcattgtcaaagttcagtagcacaaygttcatccagatgaattaatatgacagttagcrgggagttataatgctaactttgattcatatttggacagaatcatgaatatattcatatccgaagcg

SEQ ID NO: 384 - DNA, 1056 bp, Homo sapiens
  Genbank Accession No. J00123
ttctttttatcattacatcaaattgttttcccaggcttgcgtaatggaatgtgaaggtaaactgccttctctgaaaatttgggaaacctgcaaggagctcctgcagctgtccaaaccagagcttcctcaagatggcaccagcaccctcagagaaaatagcaaaccggaagaaagccatttgctagccaaaaggtatgggggcttcatgaaaaggtatggaggcttcatgaagaaaatggatgagctttatcccatggagccagaagaagaggccaatggaagtgagatcctcgccaagcggtatgggggcttcatgaagaaggatgcagaggaggacgactcgctggccaattcctcagacctgctaaaagagcttctggaaacaggggacaaccgagagcgtagccaccaccaggatggcagtgataatgaggaagaagtgagcaagagatatgggggcttcatgagaggcttaaagagaagcccccaactggaagatgaagccaaagagctgcagaagcgatatgggggcttcatgagaagagtaggtcgcccagagtggtggatggactaccagaaacggtatggaggtttcctgaagcgctttgccgaggctctgccctccgacgaagaaggcgaaagttactccaaagaagttcctgaaatggaaaaaagatacggaggatttatgagattttaatatcttttcccactagtggcccccaggccccagcaagcctccctccatcctccagtgggaaactgttgatggtgttttattgtcatgtgttgcttgccttgtatagttgacttcattgtctggataactatacaacctgaaaactgtcatttcaggttctgtgctctttttggagtctttaagctcagtattagtctattgcagctatctcgtttttcatgctaaaaatagttttttgttatcttgtctcttattttttgacaaacatccaataaatgcttacttgtatatagagataataaacctattaccccaagtgcataatatccttgtaagtctctttttctccaaggctc

SEQ ID NO: 385 - DNA, 1089 bp, Homo sapiens
  Genbank Accession No. J00231
  unsure (1)..(1089): n = a or c or g or t
cctggacctcctgtgcaagaacatgaaacanctgtggttcttccttctcctggtggcagctcccagatgggtcctgtcccaggtgcacctgcaggagtcgggcccaggactggggaagcctccagagctcaaaaccccacttggtgacacaactcacacatgcccacggtgcccagagcccaaatcttgtgacacacctcccccgtgcccacggtgcccagagcccaaatcttgtgacacacctcccccatgcccacggtgcccagagcccaaatcttgtgacacacctcccccgtgcccnnngtgcccagcacctgaactcttgggaggaccgtcagtcttcctcttccccccaaaacccaaggatacccttatgatttcccggacccctgaggtcacgtgcgtggtggtggacgtgagccacgaagacccnnnngtccagttcaagtggtacgtggacggcgtggaggtgcataatgccaagacaaagctgcgggaggagcagtacaacagcacgttccgtgtggtcagcgtcctcaccgtcctgcaccaggactggctgaacggcaaggagtacaagtgcaaggtctccaacaaagccctcccagcccccatcgagaaaaccatctccaaagccaaaggacagcccnnnnnnnnnnnnnnnnnnnnnnnnnnnnnnnnnnnngaggagatgaccaagaaccaagtcagcctgacctgcctggtcaaaggcttctaccccagcgacatcgccgtggagtgggagagcaatgggcagccggagaacaactacaacaccacgcctcccatgctggactccgacggctccttcttcctctacagcaagctcaccgtggacaagagcaggtggcagcaggggaacatcttctcatgctccgtgatgcatgaggctctgcacaaccgctacacgcagaagagcctctccctgtctccgggtaaatgagtgccatggccggcaagcccccgctccccgggctctcggggtcgcgcgaggatgcttggcacgtaccccgtgtacatacttcccaggcacccagcatggaaataaagcacccagcgctgccctgg

SEQ ID NO: 386 - DNA, 2133 bp, Homo sapiens
  Genbank Accession No. J03040
cgggagagcgcgctctgcctgccgcctgcctgcctgccactgagggttcccagcaccatgagggcctggatcttctttctcctttgcctggccgggagggccttggcagcccctcagcaagaagccctgcctgatgagacagaggtggtggaagaaactgtggcagaggtgactgaggtatctgtgggagctaatcctgtccaggtggaagtaggagaatttgatgatggtgcagaggaaaccgaagaggaggtggtggcggaaaatccctgccagaaccaccactgcaaacacggcaaggtgtgcgagctggatgagaacaacacccccatgtgcgtgtgccaggaccccaccagctgcccagcccccattggcgagtttgagaaggtgtgcagcaatgacaacaagaccttcgactcttcctgccacttctttgccacaaagtgcaccctggagggcaccaagaagggccacaagctccacctggactacatcgggccttgcaaatacatccccccttgcctggactctgagctgaccgaattccccctgcgcatgcgggactggctcaagaacgtcctggtcaccctgtatgagagggatgaggacaacaaccttctgactgagaagcagaagctgcgggtgaagaagatccatgagaatgagaagcgcctggaggcaggagaccaccccgtggagctgctggcccgggacttcgagaagaactataacatgtacatcttccctgtacactggcagttcggccagctggaccagcaccccattgacgggtacctctcccacaccgagctggctccactgcgtgctcccctcatccccatggagcattgcaccacccgctttttcgagacctgtgacctggacaatgacaagtacatcgccctggatgagtgggccggctgcttcggcatcaagcagaaggatatcgacaaggatcttgtgatctaaatccactccttccacagtaccggattctctctttaaccctccccttcgtgtttcccccaatgtttaaaatgtttggatggtttgttgttctgcctggagacaaggtgctaacatagatttaagtgaatacattaacggtgctaaaaatgaaaattctaacccaagacatgacattcttagctgtaacttaactattaaggccttttccacacgcattaatagtcccatttttctcttgccatttgtagctttgcccattgtcttattggcacatgggtggacacggatctgctgggctctgccttaaacacacattgcagcttcaacttttctctttagtgttctgtttgaaactaatacttaccgagtcagactttgtgttcatttcatttcagggtcttggctgcctgtgggcttccccaggtggcctggaggtgggcaaagggaagtaacagacacacgatgttgtcaaggatggttttgggactagaggctcagtggtgggagagatccctgcagaatccaccaaccagaacgtggtttgcctgaggctgtaactgagagaaagattctggggctgtcttatgaaaatatagacattctcacataagcccagttcatcaccatttcctcctttacctttcagtgcagtttcttttcacattaggctgttggttcaaacttttgggagcacggactgtcagttctctgggaagtggtcagcgcatcctgcagggcttctcctcctctgtcttttggagaaccagggctcttctcaggggctctagggactgccaggctgtttcagccaggaaggccaaaatcaagagtgagatgtagaaagttgtaaaatagaaaaagtggagttggtgaatcggttgttctttcctcacatttggatgattgtcataaggtttttagcatgttcctccttttcttcaccctcccctttgttcttctattaatcaagagaaacttcaaagttaatgggatggtcggatctcacaggctgagaactcgttcacctccaagcatttcatgaaaaagctgcttcttattaatcatacaaactctcaccatgatgtgaagagtttcacaaatctttcaaaataaaaagtaatgacttagaaactgaaaaaaaaaaaaaaaaaaaaaaaaaaaaaa

SEQ ID NO: 387 - DNA, 5416 bp, Homo sapiens
  Genbank Accession No. J03464
gtgtcccatagtgtttccaaacttggaaagggcgggggagggcgggaggatgcggagggcggaggtatgcagacaacgagtcagagtttccccttgaaagcctcaaaagtgtccacgtcctcaaaaagaatggaaccaatttaagaagccagccccgtggccacgtcccttcccccattcgggccctcctctgcgcccccgcaggctcctcccagctgtggctgcccgggcccccagccccagccctcccattggtggaggcccttttggaggcaccctagggccagggaaacttttgccgtataaatagggcagatccgggatttgttattttagcaccacggcagcaggaggtttcggctaagttggaggtactggccacgactgcatgcccgcgcccgccatgtgatacctccgccggtgacccagggctctgcgacacaaggagtcgcatgtctaagtgctagacatgctcagctttgtggatacgcggactttgttgctgcttgcagtaaccttatgcctagcaacatgccaatctttacaagaggaaactgtaagaaagggcccagccggagatagaggaccacgtggagaaaggggtccaccaggccccccaggcagagatggtgaagatggtcccacaggccctcctggtccacctggtcctcctggcccccctggtctcggtgggaactttgctgctcagtatgatggaaaaggagttggacttggccctggaccaatgggcttaatgggacctagaggcccacctggtgcagctggagccccaggccctcaaggtttccaaggacctgctggtgagcctggtgaacctggtcaaactggtcctgcaggtgctcgtggtccagctggccctcctggcaaggctggtgaagatggtcaccctggaaaacccggacgacctggtgagagaggagttgttggaccacagggtgctcgtggtttccctggaactcctggacttcctggcttcaaaggcattaggggacacaatggtctggatggattgaagggacagcccggtgctcctggtgtgaagggtgaacctggtgcccctggtgaaaatggaactccaggtcaaacaggagcccgtggtcttcctggtgagagaggacgtgttggtgcccctggtccagctggtgcccgtggaagtgatggaagtgtgggtcccgtaggtcctgctggtcctaatgggtctgctggccctccaggtttcccaggtgcccctggtcccaagggtgaaattggagctgttggtaacgctggtcctactggacccgccggtccccgtggtgaagtgggtcttccaggcctctccggccccgttggacctcctggtaatcctggagcaaacggccttactggtgccaagggtgctgctggccttcccggcgttgctggggctcccggcctccctggaccccgcggtattcctggccctcctggtgctgccggtactactggtgccagaggacttgttggtgagcctggtccagctggctccaaaggagagagcggtaacaagggtgagcccggctccgctggtccccaaggtcctcctggtcccagtggtgaagaaggaaagagaggccctaatggggaagctggatctgccggccctccaggacctcctgggctgagaggtagtcctggttctcgtggtcttcctggagctgatggcagagctggcgtcatgggccctcctggtagtcgtggtgcaagtggccctgctggagtccgaggacctaatggagatgctggtcgccctggggagcctggtctcatgggacccagaggtcttcctggttcccctggaaatatcggccccgctggaaaagaaggtcctgtcggcctccctggcatcgacggcaggcctggcccaattggccccgttggagcaagaggagagcctggcaacattggattccctggacccaaaggccccactggtgaccctggcaaaaacggtgataaaggtcatgctggtcttgctggtgctcggggtgctccaggtcctgatggaaacaatggtgctcagggacctcctggaccacagggtgttcaaggtggaaaaggtgaacagggtcccgctggtcctccaggcttccagggtctgcctggcccctcaggtcccgctggtgaagttggcaaaccaggagaaaggggtctccatggtgagtttggtctccctggtcctgctggtccaagaggggaacgcggtcccccaggtgagagtggtgctgccggtcctactggtcctattggaagccgaggtccttctggacccccagggcctgatggaaacaagggtgaacctggtgtggttggtgctgtgggcactgctggtccatctggtcctagtggactcccaggagagaggggtgctgctggcatacctggaggcaagggagaaaagggtgaacctggtctcagaggtgaaattggtaaccctggcagagatggtgctcgtggtgctcatggtgctgtaggtgcccctggtcctgctggagccacaggtgaccggggcgaagctggggctgctggtcctgctggtcctgctggtcctcggggaagccctggtgaacgtggcgaggtcggtcctgctggccccaacggatttgctggtccggctggtgctgctggtcaaccgggtgctaaaggagaaagaggaggcaaagggcctaagggtgaaaacggtgttgttggtcccacaggccccgttggagctgctggcccagctggtccaaatggtccccccggtcctgctggaagtcgtggtgatggaggcccccctggtatgactggtttccctggtgctgctggacggactggtcccccaggaccctctggtatttctggccctcctggtccccctggtcctgctgggaaagaagggcttcgtggtcctcgtggtgaccaaggtccagttggccgaactggagaagtaggtgcagttggtccccctggcttcgctggtgagaagggtccctctggagaggctggtactgctggacctcctggcactccaggtcctcagggtcttcttggtgctcctggtattctgggtctccctggctcgagaggtgaacgtggtctacctggtgttgctggtgctgtgggtgaacctggtcctcttggcattgccggccctcctggggcccgtggtcctcctggtgctgtgggtagtcctggagtcaacggtgctcctggtgaagctggtcgtgatggcaaccctgggaacgatggtcccccaggtcgcgatggtcaacccggacacaagggagagcgcggttaccctggcaatattggtcccgttggtgctgcaggtgcacctggtcctcatggccccgtgggtcctgctggcaaacatggaaaccgtggtgaaactggtccttctggtcctgttggtcctgctggtgctgttggcccaagaggtcctagtggcccacaaggcattcgtggcgataagggagagcccggtgaaaaggggcccagaggtcttcctggcttcaagggacacaatggattgcaaggtctgcctggtatcgctggtcaccatggtgatcaaggtgctcctggctccgtgggtcctgctggtcctaggggccctgctggtccttctggccctgctggaaaagatggtcgcactggacatcctggtacggttggacctgctggcattcgaggccctcagggtcaccaaggccctgctggcccccctggtccccctggccctcctggacctccaggtgtaagcggtggtggttatgactttggttacgatggagacttctacagggctgaccagcctcgctcagcaccttctctcagacccaaggactatgaagttgatgctactctgaagtctctcaacaaccagattgagacccttcttactcctgaaggctctagaaagaacccagctcgcacatgccgtgacttgagactcagccacccagagtggagcagcggttactactggattgaccccaaccaaggatgcactatggaagccatcaaagtatactgtgatttccctaccggcgaaacctgtatccgggcccaacctgaaaacatcccagccaagaactggtataggagctccaaggacaagaaacacgtctggctaggagaaactatcaatgctggcagccagtttgaatataatgttgaaggagtgacttccaaggaaatggctacccaacttgccttcatgcgcctgctggccaactatgcctctcagaacatcacctaccactgcaagaacagcattgcatacatggatgaggagactggcaacctgaaaaaggctgtcattctacagggctctaatgatgttgaacttgttgctgagggcaacagcaggttcacttacactgttcttgtagatggctgctctaaaaagacaaatgaatggggaaagacaatcattgaatacaaaacaaataagccatcacgcctgcccttccttgatattgcacctttggacatcggtggtgctgaccatgaattctttgtggacattggcccagtctgtttcaaataaatgaactcaatctaaattaaaaaagaaagaaatttgaaaaaactttctctttgccatttcttcttcttcttttttaactgaaagctgaatccttccatttcttctgcacatctacttgcttaaattgtgggcaaaagagaaaaagaaggattgatcagagcattgtgcaatacagtttcattaactccttcccccgctcccccaaaaatttgaatttttttttcaacactcttacacctgttatggaaaatgtcaacctttgtaagaaaaccaaaataaaaattgaaaaataaaaaccataaacatttgcaccacttgtggcttttgaatatcttccacagagggaagtttaaaacccaaacttccaaaggtttaaactacctcaaaacactttcccatgagtgtgatccacattgttaggtgctgacctagacagagatgaactgaggtccttgttttgttttgttcataatacaaaggtgctaattaatagtatttcagatacttgaagaatgttgatggtgctagaagaatttgagaagaaatactcctgtattgagttgtatcgtgtggtgtattttttaaaaaatttgatttagcattcatattttccatcttattcccaattaaaagtatgcagattatttgcccaaagttgtcctcttcttcagattcagcatttgttctttgccagtctcattttcatcttcttccatggttccacagaagctttgtttcttgggcaagcagaaaaattaaattgtacctattttgtatatgtgagatgtttaaataaattgtgaaaaaaatgaaataaagcatgtttggttttccaaaagaacatat

SEQ ID NO: 388 - DNA, 3890 bp, Homo sapiens
  Genbank Accession No. J03507
atgaaggtgataagcttattcattttggtgggatttataggagagttccaaagtttttcaagtgcctcctctccagtcaactgccagtgggacttctatgccccttggtcagaatgcaatggctgtaccaagactcagactcgcaggcggtcagttgctgtgtatgggcagtatggaggccagccttgtgttggaaatgcttttgaaacacagtcctgtgaacctacaagaggatgtccaacagaggagggatgtggagagcgtttcaggtgcttttcaggtcagtgcatcagcaaatcattggtttgcaatggggattctgactgtgatgaagacagtgctgatgaagacagatgtgaggactcagaaaggagaccttcctgtgatatcgataaacctcctcctaacatagaacttactggaaatggttacaatgaactcactggccagtttaggaacagagtcatcaataccaaaagttttggtggtcaatgtagaaaggtgtttagtggggatggaaaagatttctacaggctgagtggaaatgtcctgtcctatacattccaggtgaaaataaataatgattttaattatgaattttacaatagtacttggtcttatgtaaaacatacgtcgacagaacacacatcatctagtcggaagcgctccttttttagatcttcatcatcttcttcacgcagttatacttcacataccaatgaaatccataaaggaaagagttaccaactgctggttgttgagaacactgttgaagtggctcagttcattaataacaatccagaatttttacaacttgctgagccattctggaaggagctttcccacctcccctctctgtatgactacagtgcctaccgaagattaatcgaccagtacgggacacattatctgcaatctgggtcgttaggaggagaatacagagttctattttatgtggactcagaaaaattaaaacaaaatgattttaattcagtcgaagaaaagaaatgtaaatcctcaggttggcattttgtcgttaaattttcaagtcatggatgcaaggaactggaaaacgctttaaaagctgcttcaggaacccagaacaatgtattgcgaggagaaccgttcatcagagggggaggtgcaggcttcatatctggccttagttacctagagctggacaatcctgctggaaacaaaaggcgatattctgcctgggcagaatctgtgactaatcttcctcaagtcataaaacaaaagctgacacctttatatgagctggtaaaggaagtaccttgtgcctctgtgaaaaaactatacctgaaatgggctcttgaagagtatctggatgaatttgacccctgtcattgccggccttgtcaaaatggtggtttggctactgttgaggggacccattgtctgtgccattgcaaaccgtacacatttggtgcggcgtgtgagcaaggagtcctcgtagggaatcaagcaggaggggttgatggaggttggagttgctggtcctcttggagcccctgtgtccaagggaagaaaacaagaagccgtgaatgcaataacccacctcccagtgggggtgggagatcctgcgttggagaaacgacagaaagcacacaatgcgaagatgaggagctggagcacttgaggttgcttgaaccacattgctttcctttgtctttggttccaacagaattctgtccatcacctcctgccttgaaagatggatttgttcaagatgaaggtccaatgtttcctgtggggaaaaatgtagtgtacacttgcaatgaaggatactctcttattggaaacccagtggccagatgtggagaagatttacggtggcttgttggggaaatgcattgtcagaaaattgcctgtgttctacctgtactgatggatggcatacagagtcacccccaaaaacctttctacacagttggtgagaaggtgactgtttcctgttcaggtggcatgtccttagaaggtccttcagcatttctctgtggctccagccttaagtggagtcctgagatgaagaatgcccgctgtgtacaaaaagaaaatccgttaacacaggcagtgcctaaatgtcagcgctgggagaaactgcagaattcaagatgtgtttgtaaaatgccctacgaatgtggaccttccttggatgtatgtgctcaagatgagagaagcaaaaggatactgcctctgacagtttgcaagatgcatgttctccactgtcagggtagaaattacacccttactggtagggacagctgtactctgcctgcctcagctgagaaagcttgtggtgcctgcccactgtggggaaaatgtgatgctgagagcagcaaatgtgtctgccgagaagcatcggagtgcgaggaagaagggtttagcatttgtgtggaagtgaacggcaaggagcagacgatgtctgagtgtgaggcgggcgctctgagatgcagagggcagagcatctctgtcaccagcataaggccttgtgctgcggaaacccagtaggctcctggaggccatggtcagcttgcttggaatccagcaggcagctggggctgagtgaaaacatctgcacaactgggcactggacagcttttccttcttctccagtgtctaccttcctcctcaactcccagccatctgtataaacacaatcctttgttctcccaaatctgaatcgaattactcttttgcctcctttttaatgtcagtaaggatatgagcctttgcacaggctggctgcgtgttcttgaaataggtgttaccttctctgggccttggttttttaaaatctgtaaaattagaggattgcactagagaaacttgaatgctccattcaggcctatcattttattaagtatgattgacacagcccatgggccagaacacactctacaaaatgactaggataacagaaagaacgtgatctcctgattagagagggtggttttcctcaatggaaccaaatataaagaggacttgaacaaaaatgacagatacaaactatttctatcctgagtagtaatctcacacttcatcctatagagtcaaccaccacagataggaattccttattctttttttaatttttttaagacagagtctcactttgttgcccaggctggagcgcagtggggtgatctcatctccctgcaacctccgcctcctgggttgaagcgattcttgtgcctcagcttcccaagcagctgggattacaggtgcccgccaccacgcccagctaatttttgcatttttagtagagatgggtttcaccatgttggccatgctcgtctccaactcctgacctcaggtaatccgtctgccttggcctcccaaatgctgggattacagacatgaaccaccacgcctggctggaatacttactcttgtcgggagattgaaccactaaaatgttagagcagaattcattatgctgtggtcacaggggtgtcttgtctgagaacaaatacaattcagtcttctctttggggttttagtatgtgtcaaacataggactggaagtttgcccctgttcttttttcttttgaaagaacatcagttcatgcctgaggcatgagtgactgtgcatttgagatagttttccctattctgtggatacagtcccagagttttcagggagtacacaggtagattagtttgaagcattgaccttttatttattccttatttctctttcatcaaaacaaaacagcagctgtgggaggagaaatgagagggcttaaatgaaatttaaaataagctatattatacaaatactatctctgtattgttctgaccctggtaaatatatttcaaaacttcagatgacaaggattagaacactcattaagatgctattcttc

SEQ ID NO: 389 - DNA, 1922 bp, Homo sapiens
  Genbank Accession No. J03910
gagacctgggcgttggtgaaggcgaggggaaagccagaatactggggtggcggacgccaaggggcgggtgtagcaggcaacctcagggaagctgggaaggcctagcagggtgagagaacccgcacacggggggcacagcgcctccctcgcgagccggtgcgaaaggggccgcctgcggtgtgcgcccagctgcgctcaagggaccttgcacttggcccatctcctgcgcacagcccaggccgggaccgcgggcggtgcggactcagcgggctgggtgcaagggcggggcggggcgtctgcgcccggccccgtctcctgactataaaagcagccgctggctgttgggctccactccgccttccacgtgcacccactgcctcttcccttctcgcttgggaactctagtctcgcctcgggttgcaatggaccccaactgctcctgtgccgctggtaagggacgcccgggttctgtgccttggaatgccaaattcccagacaccatagagagtgtccctgggtttgaggaggtcgtattttgctatcagaggtaaggggactcctttattggtccagtgctttcctgttggccaagctcctgagggcattttcctcctccctgttcctctatgtcagagttgagggtcctgaggctcaaggctgtcctgctcatgtcagagttgagggtcctgaggctcaaggctgtcctgcctcacgtcacctagttggtcacagggctgctggctgagccccaattctctaacctgactctgagctaccggattggataggagacattggataggagggacattgcctcttccaagttcaggacagaaagtcgaagtcttcctaggccgtgatctgcagggactttcctttggagtagaaataggagggtgcttggttttcccagcatgaatggagaggacatggggcttctcttcctcgtctctgagtgggaaaggagctctgacggctggctctggcacagagaagggggaagtggacactcattgacccactgctgtaccttctgcatctcactcaccgttcactggctttttctcttctagcaggtgtctcctgcacctgcgccagctcctgcaagtgcaaagagtgcaaatgcacctcctgcaagaagagtgagtgcggggccatctccaggaatctggggctgtggctaaggttgggagggaacccaaggctgtccctgagtgcctgcttctggggaaccggccttcctttgtccctgtaggttgtcacgcctgtctagtcttctgcactttccaaggcttatgtgaggtggggcagctttctcaaaggaagacccattccaatgtccaccagttgtctcctgacaaaaaccatgccatcatgaactaagggtcctctggggctggagggatggagacaggcctctgttggggcagggagttctatgatcgagtctgctctgacctctcaatctcctttcctccccaaggctgctgctcctgctgccctgtgggctgtgccaagtgtgcccaaggctgcatctgcaaaggggcatcggagaagtgcagctgctgcgcctgatgtcgggacagccctgctcccaagtacaaatagagtgacccgtaaaatctaggattttttgttttttgctacaatcttgacccctttgctacattcccttttttctgtgaaatatgtgaataataattaaacacttagacttgattcccgttctggttcctgttgtgtttttggaatgagggactggggtgggagattgaactgggagttcacactgggctctggacggaaatgtgagtgctaaacaagctgagcgccttcaggcagccccgttacttctctgacctccttcctctgtaaaaggcacctgcaccgtgccggatgatatggggatggggacatacgcg

SEQ ID NO: 390 - DNA, 3622 bp, Homo sapiens
  Genbank Accession No. J04111
cccggggaggggaccggggaacagagggccgagaggcgtgcggcaggggggagggtaggagaaagaagggcccgactgtaggagggcagcggagcattacctcatcccgtgagcctccgcgggcccagagaagaatcttctagggtggagtctccatggtgacgggcgggcccgcccccctgagagcgacgcgagccaatgggaaggccttggggtgacatcatgggctatttttaggggttgactggtagcagataagtgttgagctcgggctggataagggctcagagttgcactgagtgtggctgaagcagcgaggcgggagtggaggtgcgcggagtcaggcagacagacagacacagccagccagccaggtcggcagtatagtccgaactgcaaatcttattttcttttcaccttctctctaactgcccagagctagcgcctgtggctcccgggctggtggttcgggagtgtccagagagccttgtctccagccggccccgggaggagagccctgctgcccaggcgctgttgacagcggcggaaagcagcggtaccccacgcgcccgccgggggacgtcggcgagcggctgcagcagcaaagaactttcccggcggggaggaccggagacaagtggcagagtcccggagcgaacttttgcaagcctttcctgcgtcttaggcttctccacggcggtaaagaccagaaggcggcggagagccacgcaagagaagaaggacgtgcgctcagcttcgctcgcaccggttgttgaacttgggcgagcgcgagccgcggctgccgggcgccccctccccctagcagcggaggaggggacaagtcgtcggagtccgggcggccaagacccgccgccggccggccactgcagggtccgcactgatccgctccgcggggagagccgctgctctgggaagtgagttcgcctgcggactccgaggaaccgctgcgcccgaagagcgctcagtgagtgaccgcgacttttcaaagccgggtagcgcgcgcgagtcgacaagtaagagtgcgggaggcatcttaattaaccctgcgctccctggagcgagctggtgaggagggcgcagcggggacgacagccagcgggtgcgtgcgctcttagagaaactttccctgtcaaaggctccggggggcgcgggtgtcccccgcttgccagagccctgttgcggccccgaaacttgtgcgcgcacgccaaactaacctcacgtgaagtgacggactgttctatgactgcaaagatggaaacgaccttctatgacgatgccctcaacgcctcgttcctcccgtccgagagcggaccttatggctacagtaaccccaagatcctgaaacagagcatgaccctgaacctggccgacccagtggggagcctgaagccgcacctccgcgccaagaactcggacctcctcacctcgcccgacgtggggctgctcaagctggcgtcgcccgagctggagcgcctgataatccagtccagcaacgggcacatcaccaccacgccgacccccacccagttcctgtgccccaagaacgtgacagatgagcaggaggggttcgccgagggcttcgtgcgcgccctggccgaactgcacagccagaacacgctgcccagcgtcacgtcggcggcgcagccggtcaacggggcaggcatggtggctcccgcggtagcctcggtggcagggggcagcggcagcggcggcttcagcgccagcctgcacagcgagccgccggtctacgcaaacctcagcaacttcaacccaggcgcgctgagcagcggcggcggggcgccctcctacggcgcggccggcctggcctttcccgcgcaaccccagcagcagcagcagccgccgcaccacctgccccagcagatgcccgtgcagcacccgcggctgcaggccctgaaggaggagcctcagacagtgcccgagatgcccggcgagacaccgcccctgtcccccatcgacatggagtcccaggagcggatcaaggcggagaggaagcgcatgaggaaccgcatcgctgcctccaagtgccgaaaaaggaagctggagagaatcgcccggctggaggaaaaagtgaaaaccttgaaagctcagaactcggagctggcgtccacggccaacatgctcagggaacaggtggcacagcttaaacagaaagtcatgaaccacgttaacagtgggtgccaactcatgctaacgcagcagttgcaaacattttgaagagagaccgtcgggggctgaggggcaacgaagaaaaaaaataacacagagagacagacttgagaacttgacaagttgcgacggagagaaaaaagaagtgtccgagaactaaagccaagggtatccaagttggactgggttcggtctgacggcgcccccagtgtgcacgagtgggaaggacttggtcgcgccctcccttggcgtggagccagggagcggccgcctgcgggctgccccgctttgcggacgggctgtccccgcgcgaacggaacgttggactttcgttaacattgaccaagaactgcatggacctaacattcgatctcattcagtattaaaggggggagggggagggggttacaaactgcaatagagactgtagattgcttctgtagtactccttaagaacacaaagcggggggagggttggggaggggcggcaggagggaggtttgtgagagcgaggctgagcctacagatgaactctttctggcctgctttcgttaactgtgtatgtacatatatatattttttaatttgattaaagctgattactgtcaataaacagcttcatgcctttgtaagttatttcttgtttgtttgtttgggtatcctgcccagtgttgtttgtaaataagagatttggagcactctgagtttaccatttgtaataaagtatataatttttttatgttttgtttctgaaaattccagaaaggatatttaagaaaatacaataaactattggaaagtactcccctaacctcttttctgcatcatctgtagatcctagtctatctaggtggagttgaaagagttaagaatgctcgataaaatcactctcagtgcttcttactattaagcagtaaaaactgttctctattagacttagaaataaatgtacctgatgtacctgatgctatgtcaggcttcatactccacgctcccccagcgtatctatatggaattgcttaccaaaggctagtgcgatgtttcaggaggctggaggaaggggggttgcagtggagagggacagcccactgagaagtcaaacatttcaaagtttggattgcatcaagtggcatgtgctgtgaccatttataatgttagaaattttacaataggtgcttattctcaaagcaggaattggtggcagattttacaaaagatgtatccttccaatttggaatcttctctttgacaattcctagataaaaagatggcctttgtcttatgaatatttataacagcattctgtcacaataaatgtattcaaataccaataacagatcttgaattgcttccctttactacttttttgttcccaagttatatactgaagtttttatttttagttgctgaggtt

SEQ ID NO: 391 - DNA, 696 bp, Homo sapiens
  Genbank Accession No. J04130
ttccccccccccccccccccccccgcccgagcacaggacacagctgggttctgaagcttctgagttctgcagcctcacctctgagaaaacctcttttccaccaataccatgaagctctgcgtgactgtcctgtctctcctcatgctagtagctgccttctgctctccagcgctctcagcaccaatgggctcagaccctcccaccgcctgctgcttttcttacaccgcgaggaagcttcctcgcaactttgtggtagattactatgagaccagcagcctctgctcccagccagctgtggtattccaaaccaaaagaagcaagcaagtctgtgctgatcccagtgaatcctgggtccaggagtacgtgtatgacctggaactgaactgagctgctcagagacaggaagtcttcagggaaggtcacctgagcccggatgcttctccatgagacacatctcctccatactcaggactcctctccgcagttcctgtcccttctcttaatttaatcttttttatgtgccgtgttattgtattaggtgtcatttccattatttatattagtttagccaaaggataagtgtcctatggggatggtccactgtcactgtttctctgctgttgcaaatacatggataacacatttgattctgtgtgttttccataataaaactttaaaataaaatgcagacagtta

SEQ ID NO: 392 - DNA, 853 bp, Homo sapiens
  Genbank Accession No. J04164
ctagtcctgacttcacttctgatgaggaagcctctctccttagccttcagcctttcctcccaccctgccataagtaatttgatcctcaagaagttaaaccacacctcattggtccctggctaattcaccaatttacaaacagcaggaaatagaaacttaagagaaatacacacttctgagaaactgaaacgacaggggaaaggaggtctcactgagcaccgtcccagcatccggacaccacagcggcccttcgctccacgcagaaaaccacacttctcaaaccttcactcaacacttccttccccaaagccagaagatgcacaaggaggaacatgaggtggctgtgctgggggcaccccccagcaccatccttccaaggtccaccgtgatcaacatccacagcgagacctccgtgcccgaccatgtcgtctggtccctgttcaacaccctcttcttgaactggtgctgtctgggcttcatagcattcgcctactccgtgaagtctagggacaggaagatggttggcgacgtgaccggggcccaggcctatgcctccaccgccaagtgcctgaacatctgggccctgattctgggcatcctcatgaccattggattcatcctgtcactggtattcggctctgtgacagtctaccatattatgttacagataatacaggaaaaacggggttactagtagccgcccatagcctgcaacctttgcactccactgtgcaatgctggccctgcacgctggggctgttgcccctgcccccttggtcctgcccctagatacagcagtttatacccacacacctgtctacagtgtcattcaataaagtgcacgtgcttgtga

SEQ ID NO: 393 - DNA, 2099 bp, Homo sapiens
  Genbank Accession No. K02215
aagaagctgccgttgttctgggtactacagcagaagggtatgcggaagcgagcaccccagtctgagatggctcctgccggtgtgagcctgagggccaccatcctctgcctcctggcctgggctggcctggctgcaggtgaccgggtgtacatacaccccttccacctcgtcatccacaatgagagtacctgtgagcagctggcaaaggccaatgccgggaagcccaaagaccccaccttcatacctgctccaattcaggccaagacatcccctgtggatgaaaaggccctacaggaccagctggtgctagtcgctgcaaaacttgacaccgaagacaagttgagggccgcaatggtcgggatgctggccaacttcttgggcttccgtatatatggcatgcacagtgagctatggggcgtggtccatggggccaccgtcctctccccaacggctgtctttggcaccctggcctctctctatctgggagccttggaccacacagctgacaggctacaggcaatcctgggtgttccttggaaggacaagaactgcacctcccggctggatgcgcacaaggtcctgtctgccctgcaggctgtacagggcctgctagtggcccagggcagggctgatagccaggcccagctgctgctgtccacggtggtgggcgtgttcacagccccaggcctgcacctgaagcagccgtttgtgcagggcctggctctctatacccctgtggtcctcccacgctctctggacttcacagaactggatgttgctgctgagaagattgacaggttcatgcaggctgtgacaggatggaagactggctgctccctgatgggagccagtgtggacagcaccctggctttcaacacctacgtccacttccaagggaagatgaagggcttctccctgctggccgagccccaggagttctgggtggacaacagcacctcagtgtctgttcccatgctctctggcatgggcaccttccagcactggagtgacatccaggacaacttctcggtgactcaagtgcccttcactgagagcgcctgcctgctgctgatccagcctcactatgcctctgacctggacaaggtggagggtctcactttccagcaaaactccctcaactggatgaagaaactgtctccccggaccatccacctgaccatgccccaactggtgctgcaaggatcttatgacctgcaggacctgctcgcccaggctgagctgcccgccattctgcacaccgagctgaacctgcaaaaattgagcaatgaccgcatcagggtgggggaggtgctgaacagcattttttttgagcttgaagcggatgagagagagcccacagagtctacccaacagcttaacaagcctgaggtcttggaggtgaccctgaaccgcccattcctgtttgctgtgtatgatcaaagcgccactgccctgcacttcctgggccgcgtggccaacccgctgagcacagcatgaggccagggccccagaacacagtgcctggcaaggcctctgcccctggcctttgaggcaaaggccagcagcagataacaaccccggacaaatcagcgatgtgtcacccccagtctcccaccttttcttctaatgagtcgactttgagctggaaagcagccgtttctccttggtctaagtgtgctgcatggagtgagcagtagaagcctgcagcggcacaaatgcacctcccagtttgctgggtttattttagagaatgggggtggggaggcaagaaccagtgtttagcgcgggactactgttccaaaaagaattccaaccgaccagcttgtttgtgaaacaaaaaagtgttcccttttcaagttgagaacaaaaattgggttttaaaattaaagtatacatttttgcattgccttcggtttgtatttagtgtcttgaatgtaagaacatgacctccgtgtagtgtctgtaataccttagttttttccacagatgcttgtgatttttgaacaatacgtgaaagatgcaagcacctgaatttctgtttgaatgcggaacaatagctggttatttctcccttgtgttagtaataaacgtcttgccac

SEQ ID NO: 394 - DNA, 8090 bp, Homo sapiens
  Genbank Accession No. K02405
ggatccttttgtaacattaaacaagtcatattaatcttaaatttgtatatgtgaagatctagatgtaaaatgcatgaaacatgatccacattttacaaagagaagcctggggcaaaataaattcagtaatttgttgactctcataaagcacattagtggtggaactgcaactcaccattatttccttctaagaactttgctctttcaccaaaacttaaggctcctcagggtgtgtctaagacaacagcagtaaaaatgtctatgacagcaattttctctcccctgaaatatgatccccacttaatttgccctattgaaagatcccaagtataagaacaactggtttttaatcaatattacaaagatgtttactgttgaatgcatttttctttggcttcttaaaatcccttaggcattcaatcttcagctcttccataattgagaggaattttcacctcaaatgttcatccagtgcaattgaaagacgtccagtgcaggcactggattcagaaccttcacaaaaaaaaaatctgcccagagacagatgaggtccttcagctccagtgctgattggttcctttccaagggaccatccaatcctaccacgcatggaaacatccacagatttttattctttctgccaggtacatcagatccatcaggtccgagctgtgttgactaccacttttcccttcgtctcaattatgtcttggaaaaaggctttgcggatccccggaggccttcgggcagcaactgtgaccttgatgctgtcgatgctgagcaccccagtggctgagggcagagactctcccggtaagtgcagggcagctgctctccagagccgctactctgggaacaggctctccttgggctggggtacggggatggtgatctccataatctcggacacaatcttttatcaacatttcctctgttttgggaaagagagctatgttgcatttccatttatcttttaatgatgaagtgaggacaatccaatcccatcctacggacttaagccgaagaggaggagagaggagagaaaagaggagacaaagtgttcatttactaccagtgataggacaaagtgagcatggggttatttttgaaagatatgaatttctccaaagacacagcaggatttgccatttaggcgtgtcccaagacttgcctgactaaatattatgatttcctgcattgggaaatgcaaggcagcaatggtgtctgtagtctccgtatttggggaaaagttgtctgcattcctgacccagtggagcgtttgtggaggcaaaatcttggtactgagggaagctgactggcactccacagaaagagagccttcaggtttcggcaaatggtgacctgagtgggattccagatacccgagttgatgatggactaaatttagtagaaaggaggatgtaaagaagggaaataacacatactgtgaaaccaactcatttcagacacggaacaatactttacataaattctctctcactccttctaacatcctgtgtgtagatatcatgattttcttttacacaattatacttgtagtatggatattctgttacataaactgcccgggctggtgactgccacagttcaatgggaatctagtttatcaaattcaaaagcttgtgctctttcggtgaataaatgtttctttctaggactcagagatctaggactcccttctttctaacacagcgtgagtgaacctcacagggcacttgggagggtaaatccaggcatgggaaggaaggtattttacccagggaccaagagaataggcgtatcggaagaggacaggtttaattctgaacctgtctcgtcattcccttgaactgtcaggtttatgtggataactttatctctgaggtacccaggagctccatggaaaatgagatttcatgcgagaacgccctgatccctctaagtgcagaggtccatgtaaaatcagcccgactgcctcttcacttggttcacaggccgagacagggacagggctttcctccctttcctgcctgtaggaaggcggattcccgaagaccccgagaggggcgggcagggctggcagagttcgggaggatcccaggtctgcagcgcgaggcacgggccggcgggaacttgtggtcgcgcgggctgttccacacgtccgggccgggtcagggtggcggctgcgggggcggacgggctgggcgcactgactggccggtgattcctcgcagaggatttcgtgtaccagtttaagggcatgtgctacttcaccaacgggacagagcgcgtgcgtcttgtgagcagaagcatctataaccgagaagagatcgtgcgcttcgacagcgacgtgggggagttccgggcggtgacgctgctggggctgcctgccgccgagtactggaacagccagaaggacatcctggagaggaaacgggcggcggtggacagggtgtgcagacacaactaccagttggagctccgcacgaccttgcagcggcgaggtgagcggcgtcgcccctctgcgaggcccacccttggccccaagtctctgcgccaggaggggcgaagggtcgtggcctctggaacctgagccccgtttgttccaccccagaggacaggaggcagcggcgagagtggtgggggcagggtcatcggaggtgcggggacctaggcagagcagggggacaggcagagttggccaggctgcctagtgtcgccccagcctacccgttcgtcggccttgtcctctgctctgcatgttcttgcctcgtgccttatgcatttgcctccttttgccttacctttgctaagcagctctctctgctcagaatgcccgccctcttcccctgcccgcccgcccgccccactagcactgccccacccagcaaggcccatcgtgcacagctcttgcagcaggaagcttcaggcttagcctggtggagttagggctgttccacaactgcgcgcaggacattcagcaattacagttgtgaaataagatattttaacttttggcttcaaatcattattcatcgtaattctgttttcttaaatggctctcattcatggcagagatctttgaggtgagggtgttttaatcattgcatgcctagtacctgacacattgactggtatgtggtgtgagctcaatgatcttctgttaaattaatgaataaatgtactcagctgcccatccacttaggctcaagaaaaaaaaagaggtaaacagagccttaaaaatggactttattaattattttctataattttgcttaatgctttaaagtaaactcttattgacttggatcttaatagagtttgtgaatacaaaatctgaggaaaaaagtttttgctaaaaataaaaacaacgcttgaaagatattgtaaggcagttcaaatttcttttcttttcttttttttttttttttgagacggattctcactctgtcgcccaggccggagtgcagtggcgcatctcggctcactgcaagctccgcctcccgggttcacgccattctcctgcctcagcctcctgagtaggtgggattacaggcgcgtgccaccacgcccggctaatttttttgtatttttagtagaggcggggtttcaccgtgttagccaggatggtctggatctcctgacctcatgatccgcccgcctcggcctcccaaagtgctgggattacaggtgtgagccacagtgcccggccggcactttaatttcttagaaaaagctgaacaaatggcacaatgcaaagagcaaaagttttggaataaatagattgaagccattaaattattggataaaaatagtttcgggttgcttttggcctaggttctcccctccccccatgactatccacttcaggaataaacattctgaaagtcaattttacccatttgatgagacatttatttctagacagttgccttatcaaataccatctatgttacgtcatttaatctcacagttacttgtgcatcagagattagcatcaccactttatatattggtacatgataaacactttattggtcatggatggggagatggtcactgtaggctaatattggtacatgataaacactttaagtaatcagcccataattgctcaccaagaccttaagcctcccaaagtacacaacattctttgtgttcttcactacacatccatagagtctaagggacgtaagcctcgttaaagccagttttagaccgagaagcagcaatgagtctatcctgtgtgatttccatgttaatgggacaaaatgatactttcaaggcattgaaaattcatgattaatcaatccctagtctgaccccagtgttatctatgcaggtttgcaaaacctttagttcactaatactccccttgccttcttttgattcacatcctaatgccagcaaatacttattttttgctatttcagttccatttccataaaatttattttatcatcttttctcataaatttatgccctctatttttactcccaatctgttcaagatgaacaaatcttataaggccacatagctgactgttatttctgttggatctcaggaaggagaacctaaagaaaagttcaagtccaagcagaaaccgtgatttcttccagatgatggctcatgagtgccatttaattggggtgccacctggtgacctcagcaaatcccagctatatttatgtgttcacattacaggatcattaacccagaccgaccactgcacaagatctcagaatattttctatgggagaacatacataataatgcctgatttcagaagaagaaagtaattctcaatagcaaggggatggagtagggtagacagctgtaattaaactcacttgtgtgataaaaagaaattaagggaaaaagaaaatgaggagaacatattactaaataaagaaagcatacattaaatatttactatagtttcacactaagagaataaaggaaatgcaataaagtggcctgaaaggtaaaggatgagatgtgtaaaggggtgtagtatttttcatatgacgacgaactgagaagataaaggaatcgagttacgggcaaacatgatgtttgatcagtgttatttgttttcaaggcctgcctaaatttttttcaaatattacaaacttttgaaataacatttctttttgttttttgctgtctgttactaggttgcacatttcataaaggcagggaccatggtatgttgtttgtctttggattctcagtgattgttatatttatatttgttgaaggaaccttaatccaagacttggactccaagtatctttccactctggttccaaggagggacctccctccagcaggcatgctgtgtggtctcacatctcactcctatatctttccctgtctgttactgccctcagtggagcccacagtgaccatctccccatccaggacagaggccctcaaccaccacaacctgctggtctgctcggtgacagatttctatccagcccagatcaaagtccggtggtttcggaatgaccaggaggagacagctggcgttgtgtccaccccccttattaggaatggtgactggaccttccagatcctggtgatgctggaaatgactccccagcgtggagacgtctacacctgccacgtggagcaccccagcctccagagccccatcaccgtggagtggcgtaaggggatattgagtttctgttactgtgggccccacaagacaaaggacagagctccttctgacccatcccttcccatctcttatccctgatgtcactgctgagctgggaatcacaggagactagagcacctctagttccatggcgagtgcatcagaagaatcctgatctcatcacctttccagatgctagggaaattactctacatactgttgctctggatccagtcctgattgctctgaggaactgattattagggctggtgactgggatcttagggtctaagtttatggatgagttcctgaggagtggagatctgcttccccactctgtcacctactcactgtatccaaggacctattggctggcctttccctcccttaggggtggtctgaatggagaactaggttcctttgatgccttcacctcctgcatctcagactggacttcaagctcctcatcagggaaactatggggtatggggacaaacactgacactcaggctctgcttctcaggggctcaatctgaatctgcccagagcaagatgctgagtggcattggaggcttcgtgctggggctgatcttcctcgggctgggccttatcatccatcacaggagtcagaaaggtgaggaaccccaggggaaaaggggaagatggcctgtgacccagaccctctgttcagagaggtcctgtctctagatgtagctctttcctcctgaccctgagaggaagaaagctgagctggaagtggaaggagacaggacaaggttggaggaggcattggaatctgattttactagctgaagggtagccctgtcacagagctgactgatagagcttattccagggcatccttaccattcatcattgtctcactggctcctttccaaaaacttcctccattaagagggtcagagcctcggcctccttaccttctagtgacaatttccttcattttaggggatttcaaattagggtgctcaaggactcgaagaacatgaatgggaagagaatataactctaattaagtcacatgtgtcattttcctttggggtgagagagtgactgttcatgtaatgagacctttctctgcataacttccttttgtaagacctcaagggccaccagcaggtaatatttcgagccggcatccagtgtggggagggcacaggtgtaagagggaagagcatgagctgagtgtacctgacagtagtggtctctgttcatggtatatttgctgctataggatcaagacttaggggtgaagtttgccagtttctaggaatctccagaggttgttccccagaaccaagccttaactttggtggtatcttcctgttaaatgtggagccagaaccacggcttaaatgttagacactaggatgatgcccactttgtgccacatgatggtggctactgcctgtaggcattttccagtgactgaaagaggctgctagtggtagggatgaggtatcatccaatttcctaaaaagattgaacccttcatattcaccagaagagtaacagctgttcccccacctcccacacatctgcatcaagctgaagttctgtgtcttcatgagctgatttctcctttgcacagatcttgggggaggtgatgacaatacactctggacctcagctttgtctgtctgaagctgcaggaggcccctgaggggtggggaagatggcaggcccaccagcgtaccctgtgctgatcatccctcttctctcttcttcagggctcctgcactgactcctgagactattttaactgggattggttatcacttttctgtaacgcctgcttgtccctgcccagaattcccagctgtctgtgtcagcctgtccccctgagatcagagtcctacagtggctgtcacgcagccaccaggtcatctcctttcatccccaccttgaggcggatggctgtgaccctacttcctgcactgacccacagcctctgcctgtgcacggccagctgcatctactcaggccccaaggggtttctgtttcctattctctcctcagactgctcaagagaagcacatgaaaaccattacctgactttagagcttttttacataattaaacatgatcctgagttatctgtattctgaacttccttaattgagcagaggcaggaaatcactgcagaatgaaggaacataccttgaggtgacccagccaacctgtgcccagaaggagggttgtaccttgaaagacactgaaagaatttggggtgcaaagtcatggtgggcagaggaggtagaaaatcaactcagttgttgcatcattcatggttctttcatattgatgttcagtgcagtggcctgagaatatcccagcctctcttctggtttggtgagtgctatataagtaaacatggtggaattgtttgggggcagatag

SEQ ID NO: 395 - DNA, 1552 bp, Homo sapiens
  Genbank Accession No. L02321
caaagtctgagccccgctccgctgatgcctgtctgcagaatccgcaccaccagcaccatgcccatgactctggggtactgggacatccgtgggctggcccacgccatccgcttgctcctggaatacacagactcaagctatgtggaaaagaagtacacgatgggggacgctcctgactatgacagaagccagtggctgaatgaaaaattcaagctgggcctggactttcccaatctgccctacttgattgatggggctcacaagatcacccagagcaatgccatcctgcgctacattgcccgcaagcacaacctgtgtggggagacagaagaggagaagattcgtgtggacattttggagaaccaggttatggataaccacatggagctggtcagactgtgctatgacccagattttgagaaactgaagccaaaatacttggaggaactccctgaaaagctaaagctctactcagagtttctggggaagcggccatggtttgcaggagacaagatcacctttgtggatttccttgcctatgatgtccttgacatgaagcgtatatttgagcccaagtgcttggacgccttcctaaacttgaaggacttcatctcccgctttgagggtttgaagaagatctctgcctacatgaagtccagccaattcctccgaggtcttttgtttggaaagtcagctacatggaacagcaaatagggcccagtgatgccagaagatgggagggaggagccaaccttgctgcctgcgaccctggaggacagcctgactccctggacctgccttcttcctttttccttctttctactctcttctcttccccaaggcctcattggcttcctttcttctaacatcatccctccccgcatcgaggctctttaaagcttcagctccccactgtcctccatcaaagtccccctcctaacgtcttcctttccctgcactaacgccaacctgactgcttttcctgtcagtgcttttctcttctttgagaagccagactgatctctgagctccctagcactgtcctcaaagaccatctgtatgccctgctccctttgctgggtccctaccccagctccgtgtgatgcccagtaaagcctgaaccatgcctgccatgtcttgtcttattccctgaggctcccttgaactcaggactgtcctcgaattgtgggtggttttttgtcttctgttgtccacagccagagcttagtggatgggtgtgtgtgtgtgtgtgggggtggtgatcaggcaggttcataaatttccttggtcatttctgccctctagccacatccctctgttcctcactgtggggattactacagaaaggtgctctgtgccaagttcctcactcattcgcgctcctgtaggccgtctagaactggcatggttcaaagaggggctaggctgatggggaagggggctgagcagctcccaggcagactgccttctttcaccctgtcctgatagacttccctgatctagatatccttcgtcatgacacttctcaataaaacgtatcccaccgtattgt

SEQ ID NO: 396 - DNA, 9287 bp, Homo sapiens
  Genbank Accession No. L02870
gcaacaccaggactcgggctggaggggcgctgggctcggacctgccaaggccaccgcaggggggagcaagggacagaggcgggggtcctagctgacggcttttactgcctaggatgacgctgcggcttctggtggccgcgctctgcgccgggatcctggcagaggcgccccgagtgcgagcccagcacagggagagagtgacctgcacgcgcctttacgccgctgacattgtgttcttactggatggctcctcatccattggccgcagcaatttccgcgaggtccgcagctttctcgaagggctggtgctgcctttctctggagcagccagtgcacagggtgtgcgctttgccacagtgcagtacagcgatgacccacggacagagttcggcctggatgcacttggctctgggggtgatgtgatccgcgccatccgtgagcttagctacaaggggggcaacactcgcacaggggctgcaattctccatgtggctgaccatgtcttcctgccccagctggcccgacctggtgtccccaaggtctgcatcctgatcacagacgggaagtcccaggacctggtggacacagctgcccaaaggctgaaggggcagggggtcaagctatttgctgtggggatcaagaatgctgaccctgaggagctgaagcgagttgcctcacagccaacctccgacttcttcttcttcgtcaatgacttcagcatcttgaggacactactgcccctcgtttcccggagagtgtgcacgactgctggtggcgtgcctgtgacccgacctccggatgactcgacctctgctccacgagacctggtgctgtctgagccaagcagccaatccttgagagtacagtggacagcggccagtggccctgtgactggctacaaggtccagtacactcctctgacggggctgggacagccactgccgagtgagcggcaggaggtgaacgtcccagctggtgagaccagtgtgcggctgcggggtctccggccactgaccgagtaccaagtgactgtgattgccctctacgccaacagcatcggggaggctgtgagcgggacagctcggaccactgccctagaagggccggaactgaccatccagaataccacagcccacagcctcctggtggcctggcggagtgtgccaggtgccactggctaccgtgtgacatggcgggtcctcagtggtgggcccacacagcagcaggagctgggccctgggcagggttcagtgttgctgcgtgacttggagcctggcacggactatgaggtgaccgtgagcaccctatttggccgcagtgtggggcccgccacttccctgatggctcgcactgacgcttctgttgagcagaccctgcgcccggtcatcctgggccccacatccatcctcctttcctggaacttggtgcctgaggcccgtggctaccggttggaatggcggcgtgagactggcttggagccaccgcagaaggtggtactgccctctgatgtgacccgctaccagttggatgggctgcagccgggcactgagtaccgcctcacactctacactctgctggagggccacgaggtggccacccctgcaaccgtggttcccactggaccagagctgcctgtgagccctgtaacagacctgcaagccaccgagctgcccgggcagcgggtgcgagtgtcctggagcccagtccctggtgccacccagtaccgcatcattgtgcgcagcacccagggggtggagcggaccctggtgcttcctgggagtcagacagcattcgacttggatgacgttcaggctgggcttagctacactgtgcgggtgtctgctcgagtgggtccccgtgagggcagtgccagtgtcctcactgtccgccgggagccggaaactccacttgctgttccagggctgcgggttgtggtgtcagatgcaacgcgagtgagggtggcctggggacccgtccctggagccagtggatttcggattagctggagcacaggcagtggtccggagtccagccagacactgcccccagactctactgccacagacatcacagggctgcagcctggaaccacctaccaggtggctgtgtcggtactgcgaggcagagaggagggccctgctgcagtcatcgtggctcgaacggacccactgggcccagtgaggacggtccatgtgactcaggccagcagctcatctgtcaccattacctggaccagggttcctggcgccacaggatacagggtttcctggcactcagcccacggcccagagaaatcccagttggtttctggggaggccacggtggctgagctggatggactggagccagatactgagtatacggtgcatgtgagggcccatgtggctggcgtggatgggccccctgcctctgtggttgtgaggactgcccctgagcctgtgggtcgtgtgtcgaggctgcagatcctcaatgcttccagcgacgttctacggatcacctgggtaggggtcactggagccacagcttacagactggcctggggccggagtgaaggcggccccatgaggcaccagatactcccaggaaacacagactctgcagagatccggggtctcgaaggtggagtcagctactcagtgcgagtgactgcacttgtcggggaccgcgagggcacacctgtctccattgttgtcactacgccgcctgaggctccgccagccctggggacgcttcacgtggtgcagcgcggggagcactcgctgaggctgcgctgggagccggtgcccagagcgcagggcttccttctgcactggcaacctgagggtggccaggaacagtcccgggtcctggggcccgagctcagcagctatcacctggacgggctggagccagcgacacagtaccgcgtgaggctgagtgtcctagggccggctggagaagggccctctgcagaggtgactgcgcgcactgagtcacctcgtgttccaagcattgaactacgtgtggtggacacctcgatcgactcggtgactttggcctggactccagtgtccagggcatccagctacatcctatcctggcggccactcagaggccctggccaggaagtgcctgggtccccgcagacacttccagggatctcaagctcccagcgggtgacagggctagagcctggcgtctcttacatcttctccctgacgcctgtcctggatggtgtgcggggtcctgaggcatctgtcacacagacgccagtgtgcccccgtggcctggcggatgtggtgttcctaccacatgccactcaagacaatgctcaccgtgcggaggctacgaggagggtcctggagcgtctggtgttggcacttgggcctcttgggccacaggcagttcaggttggcctgctgtcttacagtcatcggccttccccactgttcccactgaatggctcccatgaccttggcattatcttgcaaaggatccgtgacatgccctacatggacccaagtgggaacaacctgggcacagccgtggtcacagctcacagatacatgttggcaccagatgctcctgggcgccgccagcacgtaccaggggtgatggttctgctagtggatgaacccttgagaggtgacatattcagccccatccgtgaggcccaggcttctgggcttaatgtggtgatgttgggaatggctggagcggacccagagcagctgcgtcgcttggcgccgggtatggactctgtccagaccttcttcgccgtggatgatgggccaagcctggaccaggcagtcagtggtctggccacagccctgtgtcaggcatccttcactactcagccccggccagagccctgcccagtgtattgtccaaagggccagaagggggaacctggagagatgggcctgagaggacaagttgggcctcctggcgaccctggcctcccgggcaggaccggtgctcccggcccccaggggccccctggaagtgccactgccaagggcgagaggggcttccctggagcagatgggcgtccaggcagccctggccgcgccgggaatcctgggacccctggagcccctggcctaaagggctctccagggttgcctggccctcgtggggacccgggagagcgaggacctcgaggcccaaagggggagccgggggctcccggacaagtcatcggaggtgaaggacctgggcttcctgggcggaaaggggaccctggaccatcgggcccccctggacctcgtggaccactgggggacccaggaccccgtggccccccagggcttcctggaacagccatgaagggtgacaaaggcgatcgtggggagcggggtccccctggaccaggtgaaggtggcattgctcctggggagcctgggctgccgggtcttcccggaagccctggaccccaaggccccgttggcccccctggaaagaaaggagaaaaaggtgactctgaggatggagctccaggcctcccaggacaacctgggtctccgggtgagcagggcccacggggacctcctggagctattggccccaaaggtgaccggggctttccagggcccctgggtgaggctggagagaagggcgaacgtggacccccaggcccagcgggatcccgggggctgccaggggttgctggacgtcctggagccaagggtcctgaagggccaccaggacccactggccgccaaggagagaagggggagcctggtcgccctggggaccctgcagtggtgggacctgctgttgctggacccaaaggagaaaagggagatgtggggcccgctgggcccagaggagctaccggagtccaaggggaacggggcccacccggcttggttcttcctggagaccctggccccaagggagaccctggagaccggggtcccattggccttactggcagagcaggacccccaggtgactcagggcctcctggagagaagggagaccctgggcggcctggccccccaggacctgttggcccccgaggacgagatggtgaagttggagagaaaggtgacgagggtcctccgggtgacccgggtttgcctggaaaagcaggcgagcgtggccttcggggggcacctggagttcgggggcctgtgggtgaaaagggagaccagggagatcctggagaggatggacgaaatggcagccctggatcatctggacccaagggtgaccgtggggagccgggtcccccaggacccccgggacggctggtagacacaggacctggagccagagagaagggagagcctggggaccgcggacaagagggtcctcgagggcccaagggtgatcctggcctccctggagcccctggggaaaggggcattgaagggtttcggggacccccaggcccacagggggacccaggtgtccgaggcccagcaggagaaaagggtgaccggggtccccctgggctggatggccggagcggactggatgggaaaccaggagccgctgggccctctgggccgaatggtgctgcaggcaaagctggggacccagggagagacgggcttccaggcctccgtggagaacaaggcctccctggcccctctggtccccctggattaccgggaaagccaggcgaggatgggaaacctggcctgaatggaaaaaacggagaacctggggaccctggagaagacgggaggaagggagagaaaggagattcaggcgcctctgggagagaaggtcgtgatggccccaagggtgagcgtggagctcctggtatccttggaccccaggggcctccaggcctcccagggccagtgggccctcctggccagggttttcctggtgtcccaggaggcacgggccccaagggtgaccgtggggagactggatccaaaggggagcagggcctccctggagagcgtggcctgcgaggagagcctggaagtgtgccgaatgtggatcggttgctggaaactgctggcatcaaggcatctgccctgcgggagatcgtggagacctgggatgagagctctggtagcttcctgcctgtgcccgaacggcgtcgaggccccaagggggactcaggcgaacagggccccccaggcaaggagggccccatcggctttcctggagaacgcgggctgaagggcgaccgtggagaccctggccctcaggggccacctggtctggcccttggggagaggggcccccccgggccttccggccttgccggggagcctggaaagcctggtattcccgggctcccaggcagggctgggggtgtgggagaggcaggaaggccaggagagaggggagaacggggagagaaaggagaacgtggagaacagggcagagatggccctcctggactccctggaacccctgggccccccggaccccctggccccaaggtgtctgtggatgagccaggtcctggactctctggagaacagggaccccctggactcaagggtgctaagggggagccgggcagcaatggtgaccaaggtcccaaaggagacaggggtgtgccaggcatcaaaggagaccggggagagcctggaccgaggggtcaggacggcaacccgggtctaccaggagagcgtggtatggctgggcctgaagggaagccgggtctgcagggtccaagaggcccccctggcccagtgggtggtcatggagaccctggaccacctggtgccccgggtcttgctggccctgcaggaccccaaggaccttctggcctgaagggggagcctggagagacaggacctccaggacggggcctgactggacctactggagctgtgggacttcctggaccccccggcccttcaggccttgtgggtccacaggggtctccaggtttgcctggacaagtgggggagacagggaagccgggagccccaggtcgagatggtgccagtggaaaagatggagacagagggagccctggtgtgccagggtcaccaggtctgcctggccctgtcggacctaaaggagaacctggccccacgggggcccctggacaggctgtggtcgggctccctggagcaaagggagagaagggagcccctggaggccttgctggagacctggtgggtgagccgggagccaaaggtgaccgaggactgccagggccgcgaggcgagaagggtgaagctggccgtgcaggggagcccggagaccctggggaagatggtcagaaaggggctccaggacccaaaggtttcaagggtgacccaggagtcggggtcccgggctcccctgggcctcctggccctccaggtgtgaagggagatctgggcctccctggcctgcccggtgctcctggtgttgttgggttcccgggtcagacaggccctcgaggagagatgggtcagccaggccctagtggagagcggggtctggcaggccccccagggagagaaggaatcccaggacccctggggccacctggaccaccggggtcagtgggaccacctggggcctctggactcaaaggagacaagggagaccctggagtagggctgcctgggccccgaggcgagcgtggggagccaggcatccggggtgaagatggccgccccggccaggagggaccccgaggactcacggggccccctggcagcaggggagagcgtggggagaagggtgatgttgggagtgcaggactaaagggtgacaagggagactcagctgtgatcctggggcctccaggcccacggggtgccaagggggacatgggtgaacgagggcctcggggcttggatggtgacaaaggacctcggggagacaatggggaccctggtgacaagggcagcaagggagagcctggtgacaagggctcagccgggttgccaggactgcgtggactcctgggaccccagggtcaacctggtgcagcagggatccctggtgacccgggatccccaggaaaggatggagtgcctggtatccgaggagaaaaaggagatgttggcttcatgggtccccggggcctcaagggtgaacggggagtgaagggagcctgtggccttgatggagagaagggagacaagggagaagctggtcccccaggccgccccgggctggcaggacacaaaggagagatgggggagcctggtgtgccgggccagtcgggggcccctggcaaggagggcctgatcggtcccaagggtgaccgaggctttgacgggcagccaggccccaagggtgaccagggcgagaaaggggagcggggaaccccaggaattgggggcttcccaggccccagtggaaatgatggctctgctggtcccccagggccacctggcagtgttggtcccagaggccccgaaggacttcagggccagaagggtgagcgaggtccccccggagagagagtggtgggggctcctggggtccctggagctcctggcgagagaggggagcaggggcggccagggcctgccggtcctcgaggcgagaagggagaagctgcactgacggaggatgacatccggggctttgtgcgccaagagatgagtcagcactgtgcctgccagggccagttcatcgcatctggatcacgacccctccctagttatgctgcagacactgccggctcccagctccatgctgtgcctgtgctccgcgtctctcatgcagaggaggaagagcgggtaccccctgaggatgatgagtactctgaatactccgagtattctgtggaggagtaccaggaccctgaagctccttgggatagtgatgacccctgttccctgccactggatgagggctcctgcactgcctacaccctgcgctggtaccatcgggctgtgacaggcagcacagaggcctgtcacccttttgtctatggtggctgtggagggaatgccaaccgttttgggacccgtgaggcctgcgagcgccgctgcccaccccgggtggtccagagccaggggacaggtactgcccaggactgaggcccagataatgagctgagattcagcatcccctggaggagtcggggtctcagcagaaccccactgtccctccccttggtgctagaggcttgtgtgcacgtgagcgtgcgagtgcacgtccgttatttcagtgacttggtcccgtgggtctagccttcccccctgtggacaaacccccattgtggctcctgccaccctggcagatgactcactgtgggggggtggctgtgggcagtgagcggatgtgactggcgtctgacccgccccttgacccaagcctgtgatgacatggtgctgattctggggggcattaaagctgctgttttaaaaggcaaaaaa

SEQ ID NO: 397 - DNA, 2136 bp, Homo sapiens
  Genbank Accession No. L04270
gccctggaggcccggcctggccgctcccggccctggggtgcacatcggccctgagtcccgtcccaggctctgggctcgggcagccgccgccaccgctgcccaggacgtcgggcctcctgccttcctcccaggcccccacgttgctggccgcctggccgagtggccgccatgctcctgccttgggccacctctgcccccggcctggcctgggggcctctggtgctgggcctcttcgggctcctggcagcatcgcagccccaggcggtgcctccatatgcgtcggagaaccagacctgcagggaccaggaaaaggaatactatgagccccagcaccgcatctgctgctcccgctgcccgccaggcacctatgtctcagctaaatgtagccgcatccgggacacagtttgtgccacatgtgccgagaattcctacaacgagcactggaactacctgaccatctgccagctgtgccgcccctgtgacccagtgatgggcctcgaggagattgccccctgcacaagcaaacggaagacccagtgccgctgccagccgggaatgttctgtgctgcctgggccctcgagtgtacacactgcgagctactttctgactgcccgcctggcactgaagccgagctcaaagatgaagttgggaagggtaacaaccactgcgtcccctgcaaggcagggcacttccagaatacctcctcccccagcgcccgctgccagccccacaccaggtgtgagaaccaaggtctggtggaggcagctccaggcactgcccagtccgacacaacctgcaaaaatccattagagccactgcccccagagatgtcaggaaccatgctgatgctggccgttctgctgccactggccttctttctgctccttgccaccgtcttctcctgcatctggaagagccacccttctctctgcaggaaactgggatcgctgctcaagaggcgtccgcagggagagggacccaatcctgtagctggaagctgggagcctccgaaggcccatccatacttccctgacttggtacagccactgctacccatttctggagatgtttccccagtatccactgggctccccgcagccccagttttggaggcaggggtgccgcaacagcagagtcctctggacctgaccagggagccgcagttggaacccggggagcagagccaggtggcccacggtaccaatggcattcatgtcaccggcgggtctatgactatcactggcaacatctacatctacaatggaccagtactggggggaccaccgggtcctggagacctcccagctacccccgaacctccataccccattcccgaagagggggaccctggccctcccgggctctctacaccccaccaggaagatggcaaggcttggcacctagcggagacagagcactgtggtgccacaccctctaacaggggcccaaggaaccaatttatcacccatgactgacggagtctgagaaaaggcagaagaaggggggcacaagggcactttctcccttgaggctgccctgcccacgtgggattcacaggggcctgagtagggcccggggaagcagagccctaagggattaaggctcagacacctctgagagcaggtgggcactggctgggtacggtgccctccacaggactctccctactgcctgagcaaacctgaggcctcccggcagacccacccaccccctggggctgctcagcctcaggcacggacagggcacatgataccaactgctgcccactacggcacgccgcaccggagcacggcaccgagggagccgccacacggtcacctgcaaggacgtcacgggcccctctaaaggattcgtggtgctcatccccaagcttcagagaccctttggggttccacacttcacgtggactgaggtagaccctgcatgaagatgaaattatagggaggacgctccttccctcccctcctagaggagaggaaagggagtcattaacaactagggggttgggtaggattcctaggtatggggaagagttttggaaggggaggaaaatggcaagtgtatttatattgtaaccacatgcaaataaaaagaatgggacctaaactcgtgccgctcgtgccgaattcctgcag

SEQ ID NO: 398 - DNA, 2828 bp, Homo sapiens
  Genbank Accession No. L13698
agcagccggcacggggacagccggccgcacaacggatctgcaggcgcggagcaaaatgcacccgccgcgccgcgcggtcctgcagccccgccacggccccgcggcccgcacccccccggggcgacagtgagcctctcccgccaccaccgggggccgagcggagggctctcgggtgggagagcgggaccagatctcgacagctgttcatttccaggaagccaccgcagccagagcgaaaggggaccttctgccaccagcggggcatcagccagcggcgcgcatggatttatgaagacactcatgcaagaagtgggcaggacttggacaaacttttccaccggctccgcgtccgccgctccccgcgcctcgtctcctttcccctcctctcccggcggccgccgctgcccgcgatggtggccgcgctgctgggcggcggcggcgaggcccgcggggggacagtgccgggcgcctggctgtgcctgatggcgctgctgcagctgctgggctcggcgccgcggggatcggggctggcgcacggccgccgcctcatctgctggcaggcgctgctgcagtgccagggggagccggagtgcagctacgcctacaaccagtacgccgaggcgtgcgcgccggtgctggcgcagcacggcgggggcgacgcgcccggggccgccgccgccgctttcccggcctcggccgcctctttctcgtcgcgctggcgctgcccgagtcactgcatctcggccctcattcagctcaaccacacgcgccgcgggcccgccctggaggactgtgactgcgcgcaggacgagaactgcaagtccaccaagcgcgccattgagccgtgcctgccccggacgagcggcggcggcgcgggcggccccggcgcgggcggggtcatgggctgcaccgaggcccggcggcgctgcgaccgcgacagccgctgcaacctggcgctgagccgctacctgacctactgcggcaaagtcttcaacgggctgcgctgcacggacgaatgccgcaccgtcattgaggacatgctggctatgcccaaggtggcgctgctcaacgactgcgtgtgcgacggcctcgagcggcccatctgcgagtcggtcaaggagaacatggcccgcctgtgcttcggcgccgagctgggcaacggccccggcagcagcggctcggacgggggcctggacgactactacgatgaggactacgatgacgagcagcgcaccgggggcgcgggtggtgagcagccgctggacgacgacgacggcgtcccgcacccaccgcgcccgggcagcggcgctgctgcatcgggcggccgcggggacctgccctatgggcctgggcgcaggagcagcggcggcggcggccgcttggcgccccggggcgcctggaccccactcgcctccatcttgctgctgctgcttgggccgctcttttagccctcgcgccccccgccgttggctgcgggagagcccgcgtcccactcccgtgctcgcctcgaccccgcgccgggcacctgtggcttgggacagatagaagggatggttggggatacttcccaaaactttttccaagtcaacttggtgtagccggttccccggccacgactctgggcacttcccctgaagctcctctccggagcttgacttcttggacctcctcccccgccccaattccaagctccagaaactcccaactcgtctgccgtccagaaagctagctgcagtgttcaggacgtccgggaggaagcaagcatgtgggggacagaacagtagtcctggactcgaaagggaaggtgctgaccagtggggccttagcaatttgaagggttgggaaggaggaattatatttgcaaaggggctgtctattagcatatttcctttgagggggcaaaaaaaagtgccagtatcgacttttacagattgtggccagtgaggatattataatcctatgtaaacagaaaagtcccacttaccgattcattctttcactgtttgtatctgcgcccagaattctcagtgacgtgggggtgagggtgggtggcgattgccttagagggaacccctaaattggttttggataagtttgagcccttgaccttaatttcattgctaccactctgatctcttagcacatttcttaggattaagggtccaaaaatgctgatctaaggggttgccatggtgttgaacaatgcaactttttatttaaaaaagctctgcactgccatgtatgaaagtctctttatgatgtttgtttttttgtcatttttgttctttacatcaagaaattttatgtttaaatatgcggagaatgtatattgcctctgctcctatcagggttgctaaaccctggtacatcgtatataaaatgtattaaaactggggtttgttaccagttgctgtactttgtatatagaatttttataaattgtatgcttcagaaataatttatttttaaaaagaaattaaaagttttaaactcacatccatattacacctttcccccctgaaatgtatagaatccatttgtcatcaggaatcaaaacccacagtccattgtgaagtgtgctatatttagaacagtcttaaaatgtacagtgtattttatagaattgaagttaacattcttattttcaagagaatttatggacgttgtagaaatgtacaaatgcatttccaaactgccttaaacgttgtatttttatagacatgtttttttaaaaatcctaagtttttaaataactatggatttgtgtattttttttggttatttgttttattaaaacatgtacatcagtaaagagttttaaacaatga

SEQ ID NO: 399 - DNA, 1914 bp, Homo sapiens
  Genbank Accession No. L19871
gcagccaggcgcgcactgcacagctctcttctctcgccgccgcccgagcgcacccttcagcccgcgcgccggccgtgagtcctcggtgctcgcccgccggccagacaaacagcccgcccgaccccgtcccgaccctggccgccccgagcggagcctggagcaaaatgatgcttcaacacccaggccaggtctctgcctcggaagtgagtgcttctgccatcgtcccctgcctgtcccctcctgggtcactggtgtttgaggattttgctaacctgacgccctttgtcaaggaagagctgaggtttgccatccagaacaagcacctctgccaccggatgtcctctgcgctggaatcagtcactgtcagcgacagacccctcggggtgtccatcacaaaagccgaggtagcccctgaagaagatgaaaggaaaaagaggcgacgagaaagaaataagattgcagctgcaaagtgccgaaacaagaagaaggagaagacggagtgcctgcagaaagagtcggagaagctggaaagtgtgaatgctgaactgaaggctcagattgaggagctcaagaacgagaagcagcatttgatatacatgctcaaccttcatcggcccacgtgtattgtccgggctcagaatgggaggactccagaagatgagagaaacctctttatccaacagataaaagaaggaacattgcagagctaagcagtcgtggtatgggggcgactggggagtcctcattgaatcctcattttatacccaaaaccctgaagccattggagagctgtcttcctgtgtacctctagaatcccagcagcagagaaccatcaaggcgggagggcctgcagtgattcagcaggcccttcccattctgccccagagtgggtcttggaccagggcaagtgcatctttgcctcaactccaggatttaggccttaacacactggccattcttatgttccagatggcccccagctggtgtcctgcccgcctttcatctggattctacaaaaaaccaggatgcccaccgttagattcaggcagcagtgtctgtacctcgggtgggagggatggggccatctccttcaccgtggctaccattgtcactcgtaggggatgtggagtgagaacagcatttagtgaagttgtgcaacggccagggttgtgctttctagcaaatatgctgttatgtccagaaattgtgtgtgcaagaaaactaggcaatgtactcttccgatgtttgtgtcacacaacactgatgtgacttttatatgctttttctcagatctggtttctaagagttttggggggcggggctgtcaccacgtgcagtatctcaagatattcaggtggccagaagagcttgtcagcaagaggaggaacagaattctcccagcgttaacacaaaatccatgggcagcatgatggcaggtcctctgttgcaaactcagttccaaagtcacaggaagaaagcagaaagttcaacttccaaagggttaggactctccactcaatgtcttaggtcaggagttgtgtctaggctggaagagccaaagaaatattccattttcctttccttgtggttgaaaccacagtcagtggagagatgtttggaacacagtcagtggagctggtggtaccaggtttagcattattggatgtcaaaagcattttttttgtcatgtagctgttttaagaaatctggcccagggtgtttgcagctgtgagaagtcactcacactggccacaaggacgctggctactgtctattaaaattctgatgtttctgtgaaattctcagagtgtttaattgtactcaatggtatcattacaattttctgtaagagaaaatattacttatttatcctagtattcctaacctgtcagaataataaatattgtggtaaaa

SEQ ID NO: 400 - DNA, 309 bp, Homo sapiens
  Genbank Accession No. L22524
ctctcaataggaaagagaagtaattcaagaaagaaatagaaacttcaggcagaacatccattcattcattcattggattgtatatcattgttgcacaatcagaattgataagcactgttcttccactccatttagcaattatgtcacccttttttattgcagttggtttttgaatgtctttcactccttttaaggataaactcctttatggtgtgactgtgtcttattcatctatacttgcagtgggtagatgtcaataaatgttacatacacaaataaataaaatgtttattccatggtaaatttatt

SEQ ID NO: 401 - DNA, 5911 bp, Homo sapiens
  Genbank Accession No. L25270
cttgttcctccgccgttgcaatgaactattttctctcagtccggggtggtacttttgagtaaccccttccaaatagaaacccataccagcctatttagctcggtctccactatatgaaggtttcctagggcttggtgtgacgcaacgtatacgaggctcggaaggacaccccgcggaaggatccggtttgttgtggtgtggggaggggagacgctgacaaaccaagatggcggcggcggcgctgaaggccgcggcgtttgggaggtaactgtggtggcgaaggctgcggtagtggggaggcaaccacacagtttggaagaaacggagcgggacgaagaggcggtagcagtagagtcagcctgagactctcagagcacgacggccacacgcccccttaggccctcggcgggcggcggctgcccgcttaggcctagcctccgagcattgcctcggcttcaaacagcggcggcgccatgagtccttaagggcggtccaagcctcccgatccctggcccagacctcgggcccaccatggagccggggtccgacgatttcctaccgccaccggagtgcccggtgttcgagcctagctgggccgagttccgagaccctcttggctacatcgcgaaaatcaggcccatcgcagagaaatcgggcatttgcaagatccgcccacccgcggactggcagccaccctttgctgtggaagtggacaacttcaggtttaccccccgaatccagaggctgaatgagctagaggcccagacgagagtgaaactgaactacttggaccagattgccaaattctgggaaatccagggctcctccttaaagattcccaatgtagaacggcggatcttggacctctacagtctcagcaaaattgtggtggaggaaggtggttatgaagctatctgcaaggaccgtcggtgggctcgggtagcccagcgcctcaactatccaccaggcaaaaatattggctccttgctacgctcccactacgaacgcattgtttatccctatgaaatgtaccagtctggagccaaccttgtgcagtgtaacacacgtccatttgataatgaggagaaggacaaggaatacaaaccccacagcatccccctacgacagtctgtgcagccttccaagttcaacagctatggccggcgggccaagagactgcagcctgatccggaacccacagaggaagacattgagaagaatccagagctgaaaaagctacagatctatggggcaggccccaagatgatgggcctgggcctcatggccaaagacaagactctgcggaagaaagataaggaggggcctgagtgtccccccacagtagtggtgaaggaggagttaggtggggatgtgaaggtggagtcaacatcgcctaagaccttcctggagagcaaggaggagctgagtcacagcccagaaccctgcaccaagatgaccatgaggctacggaggaaccacagcaatgcccagtttattgagtcatatgtctgccggatgtgttctcgaggggatgaggatgacaagctcctgctgtgtgatggctgtgatgacaactaccacatcttctgcctgctgcctcctctgcctgagatccccaagggtgtctggcggtgcccaaagtgtgtcatggcggagtgtaagcggcccccagaagcctttggctttgagcaggctacccgggaatacactctgcagagctttggcgagatggccgactcctttaaagctgactacttcaacatgcccgtgcatatggtgcccacagaacttgtggagaaggagttctggaggctggtaaatagcattgaggaagatgtgactgttgagtatggagctgacatccattccaaagaatttggcagcggtttccctgtcagtgacagtaaacggcacctaacccccgaagaggaggagtatgctaccagtggttggaacctaaatgtgatgccggtgttggaacagtctgtactgtgccacatcaatgcagatatctctggcatgaaggtgccctggctctacgtgggcatggtcttctcagccttttgctggcatattgaggatcactggagttactccattaactacctccactggggtgagccgaagacctggtatggggtgccctcacttgcagcagaacatttggaagaagtgatgaagaagctgacacctgaactatttgatagccagcctgacctcctgcaccaacttgtcaccctcatgaatcccaacaccctcatgtcccatggtgtgccagttgtccgcacaaaccagtgtgcaggagagtttgtcatcaccttcccccgtgcttaccacagcggcttcaaccaaggctacaactttgccgaggctgtcaacttttgcactgctgactggttgcctgctgggcgccagtgcattgagcactaccgccggctccggagatactgcgtcttctcccatgaggagcttatctgcaagatggctgcctgcccagagaagctagacctgaacctggcggcagctgtgcataaggagatgttcatcatggtgcaagaagagcggcgtctacgaaaggccctgctggagaagggtatcacagaggctgagcgagaggctttcgagctgctcccagatgatgagcgccagtgtatcaagtgcaagactacgtgtttcctgtcagccctggcctgctacgactgcccagacggccttgtctgcctttcccacatcaatgatctctgcaagtgctccagtagccggcagtacctgcggtatcggtataccttggatgagcttcctgccatgctgcataagctgaaggttcgggctgagtcctttgacacctgggccaacaaagtgcgagtggccctggaggtggaggatgggcggaagcgcagccttgaagaactgagggcactagagtctgaagcccgtgagcggaggtttcctaatagtgagctgctgcagcaactaaagaactgcctgagtgaggcagaggcttgcgtgtcccgagctctgggactggtcagcggccaggaagctggcccccacagggtggctggtctacagatgaccctgactgagctccgggcctttctggaccagatgaacaacctgccttgcgccatgcaccagattggggatgtcaagggtgttctggaacaggtggaggcctaccaggctgaggctcgtgaggccctggcctcactgccctccagtccagggctactgcagtccctgttggagagggggcggcagctgggggtggaggtgcctgaggcccagcagctccagcggcaggtggaacaggcgcgatggctggatgaggtgaaacgcacactggccccctcagcccgaaggggcaccttggctgtcatgcgaggactgttggtcgcgggtgccagtgtagcccctagccctgctgtggataaagcccaggccgagctgcaggaactgctgaccattgctgaacgctgggaggagaaagcccacctctgcctggaggccaggcagaagcatccaccagccacacttgaggccataatccgtgaagcggaaaacatccctgttcacctgcccaacatccaggctctcaaggaggctcttgctaaggcccgggcctggattgctgatgttgatgagatccaaaatggtgaccactacccctgcctggatgacttggagggcctagtagctgtgggccgggacctacctgtggggctggaggagctgagacagctagagctacaggtactgacagcgcactcctggagggagaaggcctccaagaccttcctcaagaaaaattcttgctacacgctgctggaggttctctgcccatgtgcagatgccggctcagacagcaccaagcgcagccggtggatggagaaggagctggggttgtacaaatctgacacagagctgctggggctgtctgcgcaggacctcagggacccaggctctgtgatcgtggccttcaaggagggggaacagaaggagaaggagggtatcctgcagctgcgtcgcaccaattcggccaagcccagtccactggcatcatcgagcacggcctcctctacaacctctatctgtgtgtgtgggcaggtgctggctggggcgggacgtctgcagtgtgacctgtgtcaggactggttccatgggcggtgtgtgtcagtgcctcgcctcctcagctctccgaggcccaatcccacctcatccccactgctggcctggtgggaatgggacaccaaattcctgtgtccactgtgtatgcgctcaaggcgcccgcgcctggagaccatcctggcactgctggtagccctgcagagactgcctgtgcggctgcccgagggcgaggccctgcagtgcctcacagagagggccatcagctggcaaggccgcgccaggcaggctctggcctctgaagatgtgactgctcttttgggacggctggctgagctccgccaacggctacaggctgaacctagacctgaggagcctcctaactaccctgcagcccctgcttctgaccccctcagagagggcagtggcaaggatatgcctaaggtccagggcttactggagaatggagacagtgtgaccagtcctgagaaggtagccccggaggagggctcaggtaagagagatctggagctgctgtcctcgctgttgccacagttgactggccctgtgttggaactgcctgaggcaacccgggcccccttggaggagctcatgatggagggggacctgctcgaggtgaccctggatgagaaccacagcatatggcagctgctgcaggctggacagcccccagacctggagaggatccgcacacttctggagctggagaaggcagagcgtcacgggagtcgggctcggggccgggccctggagaggcggcggcggcggaaggtggatcggggtggggagggcgatgacccagcccgagaggagctagagccaaagagggtacggagctcagggccagaggctgaggaggtccaggaggaggaagagctggaggaggagactgggggtgagggcccccctgcacccatccccaccactggcagccccagcacccaggagaaccagaatggcttggaaccggcggaagggaccacttcaggcccctcggcccctttctccactctgactccccggctgcatctgccctgcccacagcagccgcctcagcaacagttgtgacagtggctgagcctagcacagaccctgacagagacccccctcggcctcaaggatcctctttctgaccatcaagcctgcttcttggggggtgggcgggtagggggggtggccatccctgctacccgcccacccctgagtcccttgacttttgtattctgactccaaggtattgttcagacctcagctcctgggggccggcccctggagtcttccctccctggtagcctctaaccagcattcccagacacctgaggcagatagatggatgggctggtgggcaggggggtggctggggctgggccatcaccattccagagacaaggccagtgtatatgcaaactgggggactctcctcccttctctccccagttctggtcctggccaggccatgctacactaacccctgcccccactctcctcccctcttttccttccttcctacccccttctccctctcccttcccctgactgttccacccaggaggaggaaacttcacatagccgtgctcacagttttttattttaaaggaatttggctggggagctgaacagggctccctgtgatctgaagaaagcttttggtgcttgtcctcacaaccacctcagtcctccctccctgtcctcccctgtctcctttcctcctcctgggttcatgttgtaataaaagaagattgttggtgtgtaattaatttgttca

SEQ ID NO: 402 - DNA, 1480 bp, Homo sapiens
  Genbank Accession No. L33799
ctctgcaaaattcagctgctgcctctgtcttgaggaccccagcgcctttcccccggggccatgctgcctgcagccacagcctccctcctggggcccctcctcactgcctgcgccctgctgccttttgcccagggccagacccccaactacaccagacccgtgttcctgtgcggaggggatgtgaagggggaatcaggttacgtggcaagtgaggggttccccaactcctacccccctaataaggagtgcatctggaccataacggtccccgagggccagactgtgtccctctcattccgagtcttcgacctggagctgcaccccgcctgccgctacgatgctctggaggtcttcgctgggtctgggacttccggccagcggctcggacgcttttgtgggaccttccggcctgcgcccctagtcgcccccggcaaccaggtgaccctgaggatgacgacggatgagggcacaggaggacgaggcttcctgctctggtacagcgggcgggccacctcgggctctgagcaccaattttgcggggggcggctggagaaggcccagggaaccctgaccacgcccaactggcccgagtccgattaccccccgggcatcagctgttcctggcacatcatcgcgcccccggaccaggtcatcgcgctgaccttcgagaagtttgacctggagccggacacctactgccgctatgactcggtcagcgtcttcaacggagccgtgagcgacgactcccggaggctggggaagttctgcggcgacgcagtcccgggctccatctcctccgaagggaatgaactcctcgtccagttcgtctcagatctcagtgtcaccgctgatggcttctcagcctcctacaagaccctgccgcggggcactgccaaagaagggcaagggcccggccccaaacggggaactgagcctaaagtcaagctgccccccaagtcccaacctccggagaaaacagaggaatctccttcagcccctgatgcacccacctgcccaaagcagtgccgccggacaggcaccttgcagagcaacttctgtgccagcagccttgtggtgactgcgacagtgaagtccatggttcgggagccaggggagggccttgccgtgactgtcagtcttattggtgcttataaaactggaggactggacctgccaactccacccactggtgcctccctgaagttttacgtgccttgcaagcagtgcccccccatgaagaaaggagtcagttatctgctgatgggccaggtagaagagaacagaggccccgtccttcctccagagagctttgtggttctccaccggcccaaccaggaccagatcctcaccaacctaagcaagaggaagtgcccctctcaacctgtgcgggctgctgcgtcccaggactgagacgcaggccagccccggcccctagccctcaggcctctcttcttatccaaataaatgtttcttaatgaaa

SEQ ID NO: 403 - DNA, 370 bp, Homo sapiens
  Genbank Accession No. L44416
tattgtgttcactacaacaggatagggacatcagacagccccagaaaccccttccagatctgatatgggactattaatttttatgctgttaattggtattcattcacaatgcagttgaagggggaaggctccactgcattctttggctaaggcctgaatgcttgctcatctgtaagatctatactcgaggttttgttttccttttaaaattccttagggagagagggatggtttctggggggttctgaaagtatgattcaatgtgcaacatacaggtaggtcttcagcataagctgaaatatatgcatgtaaaaactttgacatctttttttttaattttccactttcttcttaactttacttctctttt

SEQ ID NO: 404 - DNA, 3775 bp, Homo sapiens
  Genbank Accession No. L49169
cattcataagactcagagctacggccacggcagggacacgcggaaccaagacttggaaacttgattgttgtggttcttcttgggggttatgaaatttcattaatcttttttttttccggggagaaagtttttggaaagattcttccagatatttcttcattttcttttggaggaccgacttactttttttggtcttctttattactcccctccccccgtgggacccgccggacgcgtggaggagaccgtagctgaagctgattctgtacagcgggacagcgctttctgcccctgggggagcaacccctccctcgcccctgggtcctacggagcctgcactttcaagaggtacagcggcatcctgtgggggcctgggcaccgcaggaagactgcacagaaactttgccattgttggaacgggacgttgctccttccccgagcttccccggacagcgtactttgaggactcgctcagctcaccggggactcccacggctcaccccggacttgcaccttacttccccaacccggccatagccttggcttcccggcgacctcagcgtggtcacaggggcccccctgtgcccagggaaatgtttcaggctttccccggagactacgactccggctcccggtgcagctcctcaccctctgccgagtctcaatatctgtcttcggtggactccttcggcagtccacccaccgccgcggcctcccaggagtgcgccggtctcggggaaatgcccggttccttcgtgcccacggtcaccgcgatcacaaccagccaggacctccagtggcttgtgcaacccaccctcatctcttccatggcccagtcccaggggcagccactggcctcccagcccccggtcgtcgacccctacgacatgccgggaaccagctactccacaccaggcatgagtggctacagcagtggcggagcgagtggcagtggtgggccttccaccagcggaactaccagtgggcctgggcctgcccgcccagcccgagcccggcctaggagaccccgagaggagacgctcaccccagaggaagaggagaagcgaagggtgcgccgggaacgaaataaactagcagcagctaaatgcaggaaccggcggagggagctgaccgaccgactccaggcggagacagatcagttggaggaagaaaaagcagagctggagtcggagatcgccgagctccaaaaggagaaggaacgtctggagtttgtgctggtggcccacaaaccgggctgcaagatcccctacgaagaggggcccgggccgggcccgctggcggaggtgagagatttgccgggctcagcaccggctaaggaagatggcttcagctggctgctgccgcccccgccaccaccgcccctgcccttccagaccagccaagacgcaccccccaacctgacggcttctctctttacacacagtgaagttcaagtcctcggcgaccccttccccgttgttaacccttcgtacacttcttcgtttgtcctcacctgcccggaggtctccgcgttcgccggcgcccaacgcaccagcggcagtgaccagccttccgatcccctgaactcgccctccctcctcgctcggtgaactctttagacacacaaaacaaacaaacacatgggggagagagacttggaagaggaggaggaggaggagaaggaggagagagaggggaagagacaaagtgggtgtgtggcctccctggctcctccgtctgaccctctgcggccactgcgccactgccatcggacaggaggattccttgtgttttgtcctgcctcttgtttctgtgccccggcgaggccggagagctggtgactttggggacagggggtgggaaggggatggacacccccagctgactgttggctctctgacgtcaacccaagctctggggatgggtggggaggggggcgggtgacgcccaccttcgggcagtcctgtgtgaggatgaagggacgggggtgggaggtaggctgtggggtgggctggagtcctctccagagaggctcaacaaggaaaaatgccactccctacccaatgtctcccacacccaccctttttttggggtgcccaggttggtttcccctgcactcccgaccttagcttattgatcccacatttccatggtgtgagatcctctttactctgggcagaagtgagcccccccttaaagggaattcgatgcccccctagaataatctcatccccccacccgacttcttttgaaatgtgaacgtccttccttgactgtctagccactccctcccagaaaaactggctctgattggaatttctggcctcctaaggctccccaccccgaaatcagcccccagccttgtttctgatgacagtgttatcccaagaccctgccccctgccagccgaccctcctggccttcctcgttgggccgctctgatttcaggcagcaggggctgctgtgatgccgtcctgctggagtgatttatactgtgaaatgagttggccagattgtggggtgcagctgggtggggcagcacacctctggggggataatgtccccactcccgaaagcctttcctcggtctcccttccgtccatcccccttcttcctcccctcaacagtgagttagactcaagggggtgacagaaccgagaagggggtgacagtcctccatccacgtggcctctctctctctcctcaggaccctcagccctggcctttttctttaaggtcccccgaccaatccccagcctaggacgccaacttctcccaccccttggcccctcacatcctctccaggaaggcagtgaggggctgtgacatttttccggagaagatttcagagctgaggctttggtacccccaaacccccaatatttttggactggcagactcaaggggctggaatctcatgattccatgcccgagtccgcccatccctgaccatggttttggctctcccaccccgccgttccctgcgcttcatctcatgaggatttctttatgaggcaaatttatattttttaatatcggggggtggaccacgccgccctccatccgtgctgcatgaaaaacattccacgtgccccttgtcgcgcgtctcccatcctgatcccagacccattccttagctatttatccctttcctggtttccgaaaggcaattatatctattatgtataagtaaatatattatatatggatgtgtgtgtgtgcgtgcgcgtgagtgtgtgagcgcttctgcagcctcggcctaggtcacgttggccctcaaagcgagccgttgaattggaaactgcttctagaaactctggctcagcctgtctcgggctgacccttttctgatcgtctcggcccctctgattgttcccgatggtctctctccctctgtcttttctcctccgcctgtgtccatctgaccgttttcacttgtctcctttctgactgtccctgccaatgctccagctgtcgtctgactctgggttcgttggggacatgagattttattttttgtgagtgagactgagggatcgtagatttttacaatctgtatctttgacaattctgggtgcgagtgtgagagtgtgagcagggcttgctcctgccaaccacaattcaatgaatccccgacccccctaccccatgctgtacttgtggttctctttttgtattttgcatctgaccccggggggctgggacagattggcaatgggccgtcccctctccccttggttctgcactgttgccaataaaaagctcttaaaaacgc

SEQ ID NO: 405 - DNA, 423 bp, Homo sapiens
  Genbank Accession No. L77701
ccggaagtgactgcggacgaatcggcgtttgccgaggctggcatagatttggctgtctccgctcatagctgcttttggcgcgaaagatgccgggtctggttgactcaaaccctgccccgcctgagtctcaggagaagaagccgctgaagccctgctgcgcttgcccggagaccaagaaggcgcgcgatgcgtgtatcatcgagaaaggagaagaacactgtggacatctaattgaggcccacaaggaatgcatgagagccctaggatttaaaatatgaaatggtggtctgctgtgtgaataaataattcctgaagaatgaagaagattaattttgggagttctttgacgaactttgatatgtggaaaaagtatttataatttattgtaagaagaaagtaaaatattactagtggaagatcttc

SEQ ID NO: 406 - DNA, 1763 bp, Homo sapiens
  Genbank Accession No. M10942
cccgggacggcagcaggtgggctgcacacggactctgggacaagtcgagctgaaaaccgcggagcaggggtggggtggagacgcccgcgacgccaaggctggggtcccggaacacgctgggaggagggtggaaggcaacctcggggaaactgggaaaggcggcctggacttcgggaacaccgcgtacctgcgggggcacagcccacccgagcgaacgggctccaaagggaaggtcccgcggtgcccaccggcagagctcagggggtggtgcgcccggcccttctgcggcgcacagcccagcccaggaacgcgggcggtgcggactcagcgggccgggtgcaggcgcggagctgggcctctgcgcccggcccgacctccgtctataaatagagcagccagttgcagggctccattctgctttccaactgcctgactgcttgttcgtctcactggtgtgagctccagcatcccctttgctcgaaatggaccccaactgctcttgcgccactggtaagggaagctctgcgccctggaatccccatttcccagccctattacagagggtctctgggtttcaggaagtcgcattttaagttctgagcgacggggactccagtacttcgttagatgctttcttcctgatcacgcccctgagagcattgccctcatccctgggcctctacgtcagagttaagaatactgaggctcaaggctgaactgctccacatcacccagttggtcatgggcctgctggctgggccccagtgctctgtccaggctctgagcaatcagtgtggttgggggtgctggaaacattgactcttcagagttcaggacagaaggttctggctcgcagtctcaatattcctgggttgtatgtgcacgtgggaccttcctggtgcggtaaaacaggagggtccttgccccttccccagcgttagtgagaggacatggggcttctgttcctctgtcctgagtgggaaaggagctctgagggctggccctgcacagaggagggggcactggagactcactgacccactgctgtaccttctgcatctcactcactgcccactgcgttttcctcttccttgtaggtggctcctgcacgtgcgccggctcctgcaagtgcaaagagtgcaaatgcacctcctgcaagaagagtgagtgcggggccatctccaggaatctggggctgtggctcaggttgggagggaactcaaggctggccctgagtgcatccttctggggaactgggctttctttgccctcattgcccgtgtcattccctctccaggctttctgccctaaattcagatggggcaggacagcatttttctcgtgggacacaaaccccaactgtaccccctatggtttcagaacagagctgtgccagacgaaaaaaagcatcctctgggtctgggttctgagctcgagccaggcttgctattagggcagggaggtgcccggtcaagtctactgccacctctcactctccccttcttccccaggctgctgttcctgctgccccgtgggctgtgccaagtgtgcccagggctgcgtctgcaaaggggcatcggagaagtgcagctgctgtgcctgatgtgggaacagctcttctcccagatgtaaatagaacaacctgcacaacctggatttttttaaaaatacaacactgagccatttgctgcatttctttttatactaaatatgtgactgacaataaaaacaattttgactttaatcttactccctgttcttct

SEQ ID NO: 407 - DNA, 1144 bp, Homo sapiens
  Genbank Accession No. M11119
ggaaatgactgacctgatgtgtgttataacccatctgagccccctacaaccaccagttttgaaataagattaagaactggccttttcctaggtgatacaagtgaaataataactagaacagaagaaaaaggaatccccaaacaagtaactttaagatttgacgcttgtgcagccattaatagtaacaagctaggaacaggatgtggttctcttaactgggaaaggagctacagagtagaaaataaatatgtttgtcatgagtcaggggtttgtgaaaattgtgccttttggccatgtgttatttaggctacttggaaaaagaacaaaaaggacttggttcatcttcagaaaggggaagccaacccctcctgtgctgccagtcactgtaacccactagaactaataattaccaatcccctagatccccattggaaaaagggagaatgtgtaaccctggggaccaaagggacagggttaaacccccaagttgccattttagttcaaggggaggtccacaagcactctcccaaaccagtgtttcaaaccttttatgaggagttaaatctgccagcaccagaacttctgaaaaagataaaaaatttgtttctccaattagcagaaaatgtagctcattcccttaatgttacttcttgttatatatgcgggggaaccactatcagagaccgatggccttgggaagcctgagagttggtgcccactgatccagctcctgatataatgggggcttgtccaggatctcatcaggactggatggctctcgctggactatactggatatgtgggcagagagcctacattcagttacctaatgaatgggcagacagttgtgttattggcactattaagccatcctttttcttattaccgataaaaactactggtactatctgtaaattccagacattgtatgagaaagcactgtaaaactttttgttctgttagctgatatatgtagcctccagtcacattcctcatgcttacttgatctatcatgaccctttcacgtggaccccttagagttgtaagcccttaaaagggctaggaatttctttttgggggagcttggctcttaagacatgagtctgccaatgctaccggccaaataaaaacctcttccttcttt

SEQ ID NO: 408 - DNA, 4577 bp, Homo sapiens
  Genbank Accession No. M11313
gctacaatccatctggtctcctccagctccttctttctgcaacatggggaagaacaaactccttcatccaagtctggttcttctcctcttggtcctcctgcccacagacgcctcagtctctggaaaaccgcagtatatggttctggtcccctccctgctccacactgagaccactgagaagggctgtgtccttctgagctacctgaatgagacagtgactgtaagtgcttccttggagtctgtcaggggaaacaggagcctcttcactgacctggaggcggagaatgacgtactccactgtgtcgccttcgctgtcccaaagtcttcatccaatgaggaggtaatgttcctcactgtccaagtgaaaggaccaacccaagaatttaagaagcggaccacagtgatggttaagaacgaggacagtctggtctttgtccagacagacaaatcaatctacaaaccagggcagacagtgaaatttcgtgttgtctccatggatgaaaactttcaccccctgaatgagttgattccactagtatacattcaggatcccaaaggaaatcgcatcgcacaatggcagagtttccagttagagggtggcctcaagcaattttcttttcccctctcatcagagcccttccagggctcctacaaggtggtggtacagaagaaatcaggtggaaggacagagcaccctttcaccgtggaggaatttgttcttcccaagtttgaagtacaagtaacagtgccaaagataatcaccatcttggaagaagagatgaatgtatcagtgtgtggcctatacacatatgggaagcctgtccctggacatgtgactgtgagcatttgcagaaagtatagtgacgcttccgactgccacggtgaagattcacaggctttctgtgagaaattcagtggacagctaaacagccatggctgcttctatcagcaagtaaaaaccaaggtcttccagctgaagaggaaggagtatgaaatgaaacttcacactgaggcccagatccaagaagaaggaacagtggtggaattgactggaaggcagtccagtgaaatcacaagaaccataaccaaactctcatttgtgaaagtggactcacactttcgacagggaattcccttctttgggcaggtgcgcctagtagatgggaaaggcgtccctataccaaataaagtcatattcatcagaggaaatgaagcaaactattactccaatgctaccacggatgagcatggccttgtacagttctctatcaacaccaccaacgttatgggtacctctcttactgttagggtcaattacaaggatcgtagtccctgttacggctaccagtgggtgtcagaagaacacgaagaggcacatcacactgcttatcttgtgttctccccaagcaagagctttgtccaccttgagcccatgtctcatgaactaccctgtggccatactcagacagtccaggcacattatattctgaatggaggcaccctgctggggctgaagaagctctccttttattatctgataatggcaaagggaggcattgtccgaactgggactcatggactgcttgtgaagcaggaagacatgaagggccatttttccatctcaatccctgtgaagtcagacattgctcctgtcgctcggttgctcatctatgctgttttacctaccggggacgtgattggggattctgcaaaatatgatgttgaaaattgtctggccaacaaggtggatttgagcttcagcccatcacaaagtctcccagcctcacacgcccacctgcgagtcacagcggctcctcagtccgtctgcgccctccgtgctgtggaccaaagcgtgctgctcatgaagcctgatgctgagctctcggcgtcctcggtttacaacctgctaccagaaaaggacctcactggcttccctgggcctttgaatgaccaggacgatgaagactgcatcaatcgtcataatgtctatattaatggaatcacatatactccagtatcaagtacaaatgaaaaggatatgtacagcttcctagaggacatgggcttaaaggcattcaccaactcaaagattcgtaaacccaaaatgtgtccacagcttcaacagtatgaaatgcatggacctgaaggtctacgtgtaggtttttatgagtcagatgtaatgggaagaggccatgcacgcctggtgcatgttgaagagcctcacacggagaccgtacgaaagtacttccctgagacatggatctgggatttggtggtggtaaactcagcaggggtggctgaggtaggagtaacagtccctgacaccatcaccgagtggaaggcaggggccttctgcctgtctgaagatgctggacttggtatctcttccactgcctctctccgagccttccagcccttctttgtggagcttacaatgccttactctgtgattcgtggagaggccttcacactcaaggccacggtcctaaactaccttcccaaatgcatccgggtcagtgtgcagctggaagcctctcccgccttccttgctgtcccagtggagaaggaacaagcgcctcactgcatctgtgcaaacgggcggcaaactgtgtcctgggcagtaaccccaaagtcattaggaaatgtgaatttcactgtgagcgcagaggcactagagtctcaagagctgtgtgggactgaggtgccttcagttcctgaacacggaaggaaagacacagtcatcaagcctctgttggttgaacctgaaggactagagaaggaaacaacattcaactccctactttgtccatcaggtggtgaggtttctgaagaattatccctgaaactgccaccaaatgtggtagaagaatctgcccgagcttctgtctcagttttgggagacatattaggctctgccatgcaaaacacacaaaatcttctccagatgccctatggctgtggagagcagaatatggtcctctttgctcctaacatctatgtactggattatctaaatgaaacacagcagcttactccagaggtcaagtccaaggccattggctatctcaacactggttaccagagacagttgaactacaaacactatgatggctcctacagcacctttggggagcgatatggcaggaaccagggcaacacctggctcacagcctttgttctgaagacttttgcccaagctcgagcctacatcttcatcgatgaagcacacattacccaagccctcatatggctctcccagaggcagaaggacaatggctgtttcaggagctctgggtcactgctcaacaatgccataaagggaggagtagaagatgaagtgaccctctccgcctatatcaccatcgcccttctggagattcctctcacagtcactcaccctgttgtccgcaatgccctgttttgcctggagtcagcctggaagacagcacaagaaggggaccatggcagccatgtatataccaaagcactgctggcctatgcttttgccctggcaggtaaccaggacaagaggaaggaagtactcaagtcacttaatgaggaagctgtgaagaaagacaactctgtccattgggagcgccctcagaaacccaaggcaccagtggggcatttttacgaaccccaggctccctctgctgaggtggagatgacatcctatgtgctcctcgcttatctcacggcccagccagccccaacctcggaggacctgacctctgcaaccaacatcgtgaagtggatcacgaagcagcagaatgcccagggcggtttctcctccacccaggacacagtggtggctctccatgctctgtccaaatatggagccgccacatttaccaggactgggaaggctgcacaggtgactatccagtcttcagggacattttccagcaaattccaagtggacaacaacaatcgcctgttactgcagcaggtctcattgccagagctgcctggggaatacagcatgaaagtgacaggagaaggatgtgtctacctccagacctccttgaaatacaatattctcccagaaaaggaagagttcccctttgctttaggagtgcagactctgcctcaaacttgtgatgaacccaaagcccacaccagcttccaaatctccctaagtgtcagttacacagggagccgctctgcctccaacatggcgatcgttgatgtgaagatggtctctggcttcattcccctgaagccaacagtgaaaatgcttgaaagatctaaccatgtgagccggacagaagtcagcagcaaccatgtcttgatttaccttgataaggtgtcaaatcagacactgagcttgttcttcacggttctgcaagatgtcccagtaagagatctcaaaccagccatagtgaaagtctatgattactacgagacggatgagtttgcaatcgctgagtacaatgctccttgcagcaaagatcttggaaatgcttgaagaccacaaggctgaaaagtgctttgctggagtcctgttctctgagctccacagaagacacgtgtttttgtatctttaaagacttgatgaataaacactttttctggtc

SEQ ID NO: 409 - DNA, 1157 bp, Homo sapiens
  Genbank Accession No. M12529
ccccagcggaggtgaaggacgtccttccccaggagccgactggccaatcacaggcaggaagatgaaggttctgtgggctgcgttgctggtcacattcctggcaggatgccaggccaaggtggagcaagcggtggagacagagccggagcccgagctgcgccagcagaccgagtggcagagcggccagcgctgggaactggcactgggtcgcttttgggattacctgcgctgggtgcagacactgtctgagcaggtgcaggaggagctgctcagctcccaagtcacccaagaactgagggcgctgatggacgagaccatgaaggagttgaaggcctacaaatcggaactggaggaacaactgaccccggtagcggaggagacgcgggcacggctgtccaaggagctgcagacggcgcaggcccggctgggcgcggacatggaggacgtgtgcggccgcctggtgcagtaccgcggcgaggtgcaggccatgctcggccagagcaccgaggagctgcgggtgcgcctcgcctcccacctgcgcaagctgcgtaagcggctcctccgcgatcccgatgacctgcagaagcgcctggcagtgtaccaggccggggcccgcgagggcgccgagcgcggcctcagcgccatccgcgagcgcctggggcccctggtggaacagggccgcgtgcgggccgccactgtgggctccctggccggccagccgctacaggagcgggcccaggcctggggcgagcggctgcgcgcgcggatggaggagatgggcagtcggacccgcgaccgcctggacgaggtgaaggagcaggtggcggaggtgcgcgccaagctggaggagcaggcccagcagatacgcctgcaggccgaggccttccaggcccgcctcaagagctggttcgagcccctggtggaagacatgcagcgccagtgggccgggctggtggagaaggtgcaggctgccgtgggcaccagcgccgcccctgtgcccagcgacaatcactgaacgccgaagcctgcagccatgcgaccccacgccaccccgtgcctcctgcctccgcgcagcctgcagcgggagaccctgtccccgccccagccgtcctcctggggtggaccctagtttaataaagattcaccaagtttcacgc

SEQ ID NO: 410 - DNA, 1493 bp, Homo sapiens
  Genbank Accession No. M13955
gaattccggcgagtgcgcgctcctcctcgcccgccgctaggtccatcccggcccagccaccatgtccatccacttcagctccccggtattcacctcgcgctcagccgccttctcgggccgcggcgccaggtgcgcctgagctccgctcgccccggcggccttggcagcagcagcctctacggcctcggcgcctcgcggccgcgcgtggccgtgcgctctgcctatgggggcccggtgggcgccggcatccgcgaggtcaccattaaccagagcctgctggccccgctgcggctggacgccgacccctccctccagcgggtgcgccaggaggagagcgagcagatcaaagccctcaacaacaagtttgcctccttcatcgacaaggtggggtttctggagcagcagaacaagctgctggagaccaagtggacgctgctgcaggagcagaagtcggccaagagcagccgcctcccagacatctttgaggcccagattgctggccttcggggtcagcttgaggcactgcaggtggatgggggccgcctggagcaggggctgcggacgatgcaggatgtggtggaggacttcaagaataagtacgaagatgaaattaaccgccgcacagctgctgagaatgagtttgtggtcctgaagaaggatgtggatgctgcctacatgagcaaggtggagctggaggccaaggtggatgccctgaatgatgagatcaacttcctcaggaccctcaatgagacggagttgacagagctgcagtcccagatctccgacacatctgtggtgctgtccatggacaacagtcgctccctggacctggacggcatcatcgctgaggtcaaggcacagtatgaggagatggccaaatgcagccgggctgaggctgaagcctggtaccagaccaagtttgagaccctccaggcccaggctgggaagcatggggacgacctccggaatacccggaatgagatttcagagatgaaccgggccatccagaggctgcaggctgagatcgacaacatcaagaaccagcgtgccaagttggaggccgccattgccgaggctgaggagtgtggggagctggcgctcaaggatgctcgtgccaagcaggaggagctggaagccgccctgcagcgggccaagcaggatatggcacggcagctgcgtgagtaccaggaactcatgagcgtgaagctggccctggacatcgagatcgccacctaccgcaagctgctggagggcgaggagagccggttggctggagatggagtgggagccgtgaatatctctgtgatgaattccactggtggcagtagcagtggcggtggcattgggctgaccctcgggggaaccatgggcagcaatgccctgagcttctccagcagtgcgggtcctgggctcctgaaggcttattccatccggaccgcatccgccagtcgcaggagtgcccgcgactgagccgcctcccaccactccactcc

SEQ ID NO: 411 - DNA, 849 bp, Homo sapiens
  Genbank Accession No. M18737
atgaggaactcctatagatttctggcatcctctctctcagttgtcgtttctctcctgctaattcctgaagatgtctgtgaaaaaattattggaggaaatgaagtaactcctcattcaagaccctacatggtcctacttagtcttgacagaaaaaccatctgtgctggggctttgattgcaaaagactgggtgttgactgcagctcactgtaacttgaacaaaaggtcccaggtcattcttggggctcactcaataaccagggaagagccaacaaaacagataatgcttgttaagaaagagtttccctatccatgctatgacccagccacacgcgaaggtgaccttaaacttttacagctgacggaaaaagcaaaaattaacaaatatgtgactatccttcatctacctaaaaagggggatgatgtgaaaccaggaaccatgtgccaagttgcagggtgggggaggactcacaatagtgcatcttggtccgatactctgagagaagtcaatatcaccatcatagacagaaaagtctgcaatgatcgaaatcactataattttaaccctgtgattggaatgaatatggtttgtgctggaagcctccgaggtggaagagactcgtgcaatggagattctggaagccctttgttgtgcgagggtgttttccgaggggtcacttcctttggccttgaaaataaatgcggagaccctcgtgggcctggtgtctatattcttctctcaaagaaacacctcaactggataattatgactatcaagggagcagtttaaataaccgtttcctttcatttactgtggcttcttaatcttttcacaaataaaatcaatttg

SEQ ID NO: 412 - DNA, 1483 bp, Homo sapiens
  Genbank Accession No. M19045
gggagcagtcaatatgaaggctctcattgttctggggcttgtcctcctttctgttacggtccagggcaaggtctttgaaaggtgtgagttggccagaactctgaaaagattgggaatggatggctacaggggaatcagcctagcaaactggatgtgtttggccaaatgggagagtggttacaacacacgagctacaaactacaatgctggagacagaagcactgattatgggatatttcagatcaatagccgctactggtgtaatgatggcaaaaccccaggagcagttaatgcctgtcatttatcctgcagtgctttgctgcaagataacatcgctgatgctgtagcttgtgcaaagagggttgtccgtgatccacaaggcattagagcatgggtggcatggagaaatcgttgtcaaaacagagatgtccgtcagtatgttcaaggttgtggagtgtaactccagaattttccttcttcagctcattttgtctctctcacattaagggagtaggaattaagtgaaaggtcacactaccattatttccccttcaaacaaataatatttttacagaagcaggagcaaaatatggcctttcttctaagagatataatgttcactaatgtggttattttatattaagcctacaacatttttcagtttgcaaatagaactaatactggtgaaaatttacctaaaaccttggttatcaaatacatctccagtacattccgttcttttttttttttttttttttgagacagtctcgctctgtcgcccaggctggagtgcagtggcgcaatctcggctcactgcaacctccacctcccgggttcacgccattctcctgcctcagcctcccgagtagctgggattacgggcgcccgccaccacgcccggctaattttttgtatttttagtagagacagggtttcaccgtgttagccaggatggtctcgatctcctgaccttgtgatccacccacctcggcctcccaaagtgctgggattacaggcgtgagccactgcgcccggccacattcagttcttatcaaagaaataacccagacttaatcttgaatgatacgattatgcccaatattaagtaaaaaatataagaaaaggttatcttaaatagatcttaggcaaaataccagctgatgaaggcatctgatgccttcatctgttcagtcatctccaaaaacagtaaaaataaccactttttgttgggcaatatgaaatttttaaaggagtagaataccaaatgatagaaacagactgcctgaattgagaattttgatttcttaaagtgtgtttctttctaaattgctgttccttaatttgattaatttaattcatgtattatgattaaatctgaggcagatgagcttacaagtattgaaataattactaattaatcacaaatgtgaagttatgcatgatgtaaaaaatacaaacattctaattaaaggctttgcaacac

SEQ ID NO: 413 - DNA, 980 bp, Homo sapiens
  Genbank Accession No. M19309
agcaaggctcagcctcaagattcacagcatctcagacgcagcctaggccgcaccaggatgtcggacaccgaggagcaggaatatgaggaggagcagccggaagaggaggctgcggacgaggaggaggaagcccccgaagagccggagccggtggcagagccagaagaggaacgccccaaaccaagccgccccgtggtgcctcctttgatcccgccaaagatcccagaaggggagcgcgttgacttcgatgacatccaccgcaagcgcatggagaaagacctgctggagctgcagacactcatcgatgtacatttcgagcagcggaagaaggaggaagaggagctggttgccttgaaggagcgcattgagcggcgccggtcagagagagccgagcaacagcgcttcagaactgagaaggaacgcgaacgtcaggctaagctggcggaggagaagatgaggaaggaagaggaagaggccaagaagcgggcagaggatgatgccaagaaaaagaaggtgctgtccaacatgggggcccattttggcggctacctggtcaaggcagaacagaagcgtggtaagcggcagacggggcgggagatgaaggtgcgcatcctctccgagcgtaagaagcctctggacattgactacatgggggaggaacagctccgggcccggtctgcctggctgcctccatcacagccctcctgccctgccagggagaaagcccaggagctgtcggactggatccaccagctggagtctgagaagttcgacctgatggcgaagctgaaacagcagaaatatgagatcaacgtgctgtacaaccgcatcagccacgcccagaagttccggaagggggcagggaagggccgcgttggaggccgctggaagtgaggatgccgccccggacagtggcacctgggaagcctgggagtgtttgtcccatcggtagcttgaaataaacgctcccctcagacacc

SEQ ID NO: 414 - DNA, 3778 bp, Homo sapiens
  Genbank Accession No. M20543
ctgcgccctccggccgccggtggccctctgtgcggtgggggaaggggtcgacgtggctcagctttttggattcagggagctcgggggtgggaagagagaaatggagttccaggggcgtaaaggagagggagttcgccttccttcccttcctgagactcaggagtgactgcttctccaatcctcccaagcccaccactccacacgactccctcttcccggtagtcgcaagtgggagtttggggatctgagcaaagaacccgaagaggagttgaaatattggaagtcagcagtcaggcaccttcccgagcgcccagggcgctcagagtggacatggttggggaggcctttgggacaggtgcggttcccggagcgcaggcgcacacatgcacccaccggcgaacgcggtgaccctcgccccaccccatcccctccggcgggcaactgggtcgggtcaggaggggcaaacccgctagggagacactccatatacggcccggcccgcgttacctgggaccgggccaacccgctccttctttggtcaacgcaggggacccgggcgggggcccaggccgcgaaccggccgagggagggggctctagtgcccaacacccaaatatggctcgagaagggcagcgacattcctgcggggtggcgcggagggaatcgcccgcgggctatataaaacctgagcagagggacaagcggccaccgcagcggacagcgccaagtgaagcctcgcttcccctccgcggcgaccagggcccgagccgagagtagcagttgtagctacccgcccaggtagggcaggagttgggaggggacagggggacagggcactaccgaggggaacctgaaggactccggggcagaacccagtcggttcacctggtcagccccaggcctcgccctgagcgctgtgcctcgtctccggagccacacgcgctttaaaaaggaggcaagacagtcagcctctggaaattagacttctccaaatttttctctagccctttgggctcctttacctggcatgtaggatgtgcctagggagataaacggttttgctttagttgtcgccaaggcagttcccttccaaactagcgctagagcgaatgagcgagcagccaggaccaccattctgggtttccaacaggcgaaaaggccctttctgagtttgaaatgtcacagggttcctaacaggccactcttccctggatggggtgccaacgcctttcccatgggcatctccttccaccctcacgctggcccagcaagcaggcagtgctgaggccttatctccctaggtgacagatgtggtcagggaggcgcagagaggatgggcactagcgtccagctcctggaacaggtgtcaggcagggagggcagacaggtcttgggaacatgttcccctggctatgtggacagaggacttctcagtgggtctcgcgaccctgtgccccttttcctggttcagggcagccttagccggggcaaaggtcgagaagagaacccctggtcgccgccctggcagaatttgagtggctccggcaggagatgtccctaggttcctggggagggaggacgtcggggccagccaggcttacccccccctgccgctgagacttctgcgctgatgcacgcgcctcttcgcggtctccctgtccttgcagaaactagacacaatgtgcgacgaagacgagaccaccgccctcgtgtgcgacaatggctccggcctggtgaaagccggcttcgccggggatgacgcccctagggccgtgttcccgtccatcgtgggccgcccccgacaccaggtcaggctgcccctccgcagagggagccggctcggggtccccgcgtaagccagcctggtgccacccggagcggcgttaacgggtgcgtggtgtctcggctctgcagggcgtcatggtcggtatgggtcagaaagattcctacgtgggcgacgaggctcagagcaagagaggtatcctgaccctgaagtaccctatcgagcacggcatcatcaccaactgggatgacatggagaagatctggcaccacaccttctacaacgagcttcgcgtggctcccgaggagcaccccaccctgctcaccgaggcccccctcaatcccaaggccaaccgcgagaagatgacccagatcatgtttgagaccttcaacgtgcccgccatgtacgtggccatccaggccgtgctgtccctctacgcctccggaaggaccaccggtgagtgcccgctggcccccagtcccctcgtcccgcccccgcccccgcccccgcccccggccgctagcgctgagcgcctagcctcggcctcgcccccagccactcactctctcccgcgcgcgcacaggcatcgtgctggactccggcgacggcgtcacccacaacgtgcccatttatgagggctacgcgctgccgcacgccatcatgcgcctggacctggcgggccgcgatctcaccgactacctgatgaagatcctcactgagcgtggctactccttcgtgaccacaggtgcgcggcgcccctgcacccgggcggagggccgcggcggcctgagtgagggctcctctcctgcttctgccctccgcagctgagcgcgagatcgtgcgcgacatcaaggagaagctgtgctacgtggccctggacttcgagaacgagatggcgacggccgcctcctcctcctccctggaaaagagctacgagctgccagacgggcaggtcatcaccatcggcaacgagcgcttccgctgcccggagacgctcttccagccctccttcatcggtgagccccgctcgccctcgccccggcccccaggcccgcgccccccggcccgagcttctgctcacgctccccgccgcggtccccaggtatggagtcggcgggcattcacgagaccacctacaacagcatcatgaagtgtgacatcgacatcaggaaggacctgtatgccaacaacgtcatgtcggggggcaccacgatgtaccctgggatcgctgaccgcatgcagaaagagatcaccgcgctggcacccagcaccatgaagatcaaggtgggtggtggcctgcgcgggctgtcggcggggtgggctccagggtgaggtctccccacctcacgcgctgtcttgcagatcatcgccccgccggagcgcaaatactcggtgtggatcggcggctccatcctggcctcgctgtccaccttccagcagatgtggatcaccaagcaggagtacgacgaggccggcccttccatcgtccaccgcaaatgcttctagacacactccacctccagcacgcgacttctcaggacgacgaatcctctcaatgggggggcggctgagctccagccaccccgcagtcactttctttgtaacaactttccgttgctgccatcgtaaactgacacagtgtttataacgtgtacatacattaacttattacctcattttgttatttttcgaaacaaagccctgtggaagaaaatggaaaacttgaagaagcattaaagtcattctgttaagctgcgtaaagtggtcgtgtttatttgcttggggcgggagtggagcaggaagagggattcccatcccccacatcctcttaagtcacttttcacgataccccaaatgaatgggctccttggaagacaaaacttacatcttcccatgctccctgccggtttctgcagtggatcagatccattccagatcactggcagctagtggtggcctgacttgacctctggggtgtggcgaggcgagctttct

SEQ ID NO: 415 - DNA, 961 bp, Homo sapiens
  Genbank Accession No. M20642
cacagcccagtgtccttgaagatggacccttttaaaaaaaaaaatggcaccaaagaaagacgtgaagaaacctgtggctgcggctgcggctgccccagccccggcaccggcacctgcacctgcccctgccccagccaaacccaaagaagaaaaaattgacctctctgccattaagatcgagttctctaaggaacagcaggatgaattcaaggaggcatttctcctctttgacagaacaggtgattccaagatcaccttaagccaggtcggtgatgtccttcgagccctgggcacaaatcccaccaatgcagaggtcaggaaagttctgggaaaccccagcaatgaagagctgaatgccaagaaaattgagtttgaacaatttctgcctatgatgcaagccatttccaacaacaaggaccaggccacctatgaagactttgttgagggtctgcgtgtctttgacaaggaaggcaatggcacagtcatgggtgctgaactccgccatgttctagccaccctgggtgaaaagatgaaagaggaagaagtggaagccctgatggcaggtcaagaagactccaatggctgcatcaactacgaagcttttgtcaagcacatcatgtctatctgaatggagctctcaagaacaagcattgtttaggaagactggctggaaacttattttaatcacacccatgacaaactctccagatctgtttaccatcattcaggaaaacaaagcaatctggacggttcaagactgagcaactccctgaatttttatacatcttcagtttttctctgaattgaattcataccacacaaacaaatgtctgctgctctagatgagaagaataaaatattgacaatctcaaatccaagcagccttctttattatctaccatgaatcaacgaaacattcttaaaacaataaatcaataaacaattttggtcagtctgaaaa

SEQ ID NO: 416 - DNA, 1160 bp, Homo sapiens
  Genbank Accession No. M21121
cctccgacagcctctccacaggtaccatgaaggtctccgcggcacgcctcgctgtcatcctcattgctactgccctctgcgctcctgcatctgcctccccatattcctcggacaccacaccctgctgctttgcctacattgcccgcccactgccccgtgcccacatcaaggagtatttctacaccagtggcaagtgctccaacccagcagtcgtctttgtcacccgaaagaaccgccaagtgtgtgccaacccagagaagaaatgggttcgggagtacatcaactctttggagatgagctaggatggagagtccttgaacctgaacttacacaaatttgcctgtttctgcttgctcttgtcctagcttgggaggcttcccctcactatcctaccccacccgctccttgaagggcccagattctgaccacgacgagcagcagttacaaaaaccttccccaggctggacgtggtggctcagccttgtaatcccagcactttgggaggccaaggtgggtggatcacttgaggtcaggagttcgagacagcctggccaacatgatgaaaccccatgtgtactaaaaatacaaaaaattagccgggcgtggtagcgggcgcctgtagtcccagctactcgggaggctgaggcaggagaatggcgtgaacccgggagcggagcttgcagtgagccgagatcgcgccactgcactccagcctgggcgacagagcgagactccgtctcaaaaaaaaaaaaaaaaaaaaaaaaaatacaaaaattagccgcgtggtggcccacgcctgtaatcccagctactcgggaggctaaggcaggaaaattgtttgaacccaggaggtggaggctgcagtgagctgagattgtgccacttcactccagcctgggtgacaaagtgagactccgtcacaacaacaacaacaaaaagcttccccaactaaagcctagaagagcttctgaggcgctgctttgtcaaaaggaagtctctaggttctgagctctggctttgccttggctttgcaagggctctgtgacaaggaaggaagtcagcatgcctctagaggcaaggaagggaggaacactgcactcttaagcttccgccgtctcaacccctcacaggagcttactggcaaacatgaaaaatcgggg

SEQ ID NO: 417 - DNA, 676 bp, Homo sapiens
  Genbank Accession No. M21494
acgaatgaacaggcattacctgtgtgcaggtaacctgttacacagtaggcactcactacatgcggctgttgcatttggcacgggggcacgtcccagcccctctgcaccttcgctgcctcttcacgcccctgtcccttgctcccacaggtggcgtggacacagctgccgtgggctcagtatttgacgtgtccaacgctgatcggctgggctcgtccgaagtagaacaggtgcagctggtggtggatggtgtgaagctcatggtggaaatggagaagaagttggagaaaggccagtccattgacgacatgatccccgcccagaagtaggcgcctgcccacctgccaccgactgctggaacccagccagtgggagggcctggcccaccagagtcctgctccctcactcctcgccccgccccctgtcccagagtcccacctgggggctctccccacccttctcagagttccagtttcaaccagagttccaaccaatgggctccatcctctggattctggccaatgaaatatctccctggcagggtcctcttcttttcccagagctccaccccaaccaggagctctagttaatggagagctcccagcacactcggagcttgtgctttgtctccacgcaaagcgataaataaaagcattggtggccttagctttgtgcgata

SEQ ID NO: 418 - DNA, 1688 bp, Homo sapiens
  Genbank Accession No. M21665
tcctcgctggagaagaccaagcaccggctacagaatgagatcgaggacttgatggtggacgtagagcgctccaatgctgctgctgctgctctggacaagaagcagaggaacttcgacaagatcctggccgagtggaagcagaagtatgaggagtcgcagtcggagctggagtcctcgcagaaggaggctcgctccctcagcacagagctcttcaaactcaagaacgcctatgaggagtccctggaacatctggagaccttcaagcgggagaacaaaaacctgcaggaggagatctccgacttgactgagcagttgggttccagcggaaagactatccatgagctggagaaggtccgaaagcagctggaggccgagaagatggagctgcagtcagccctggaggaggccgaggcctccctggagcacgaggagggcaagatcctccgggcccagctggagttcaaccagatcaaggcagagatcgagcggaacgtggcagagaaggacgaggagatggaacaggccaagcgcaaccacctgcgggtggtggactcgctgcagacctccctggacgcagagacacgcagccgcaacgaggccctgagggtgaagaagaagatggaaggagacctcaatgagatggagatccagctcagccacgccaaccgcatggccgccgaggcccagaagcaagtcaagagcctccagagcttgttgaaggacacccagattcagctggacgatgcagtccgtgccaacgacgacctgaaggagaacatcgccatcgtggagcggcgcaacaacctgctgcaggctgagctggaggagttgcgcgccgtggtggagcagacagagcggtcccggaagctggcggagcaggagctgattgagactagtgagcgggtgcagctgctgcattcccagaacaccagcctcatcaaccagaagaagaagatggacgctgacctgtcccagctccagactgaagtggaggaggcagtgcaggagtgcaggaatgctgaggagaaggccaagaaggccatcacggatgccgccatgatggcagaggagctgaagaaggagcaggacaccagcgcccacctggagcgcatgaagaagaacatggaacagaccattaaggacctgcagcaccggctggacgaagccgagcagatcgccctcaagggcggcaagaagcagctgcagaagctggaagcgcgggtgcgggagctggagaatgagctggaggccgagcagaagcgcaacgcagagtcggtgaagggcatgaggaagagcgagcggcgcatcaaggagctcacctaccagacggaggaggacaggaaaaacctgctgcggctgcaggacctggtagacaagctgcagctaaaggtcaaggcctacaagcgccaggccgaggaggcggaggagcaagccaacaccaacctgtccaagttccgcaaggtgcagcacgagctggatgaggcagaggagcgggcggacatcgccgagtcccaggtcaacaagctgcgggccaagagccgtgacattggcacgaagggcttgaatgaggagtagctttgccacatcttgatctgctcagcgcctgaggtgccagcaaagccccatgctggagcctgtgtaacagctcgcttgggaggaagcagaataaagcaatttccttgaagccg

SEQ ID NO: 419 - DNA, 229 bp, Homo sapiens
  Genbank Accession No. M22406
ctgcacccaaacagacacatcaacgcaccccactcacagacaccccttaccccacccccactgtgcagagaccaaccatgacacccatcaccaccaccaccacggtgaccccaaccccaacacccaccggcacacagaccccaacaacgacacccatcagcaccaccaccacggtgaccccaaccccaacacccaccggcacacagaccccaagatcgacacccatcac

SEQ ID NO: 420 - DNA, 1568 bp, Homo sapiens
  Genbank Accession No. M24069
gaattcgggcgggggagcccaaggagcgagcgcgccagacgaagctcgagccgcctccgccagcgcgaccccacctcggccgccggcctgcgccgcgagatccgccccggcctccccgagagcgagccccggccgccgcgaccaccagccgcgctaaccgccgaccaaccgccaccgaggcgcctgagcgagagcagaggaggaggaggcatgagtgaggcgggcgaggccaccaccaccaccaccaccaccctcccgcaggctccgacggaggcggccgccgcggctccccaggaccccgcgcccaagagcccggtgggcagcggtgcgccccaggccgcggccccggcgcccgccgcccacgtcgcaggaaaccccggtggggacgcggcccctgcagccacgggcaccgcggccgccgcctctttagccgccgccgccggcagcgaagacgcggagaaaaaagttctcgccaccaaagtccttggcactgtcaaatggttcaacgtcagaaatggatatggatttataaatcgaaatgacaccaaagaagatgtatttgtacatcagactgccatcaagaagaataacccacggaaatatctgcgcagtgtaggagatggagaaactgtagagtttgatgtggttgaaggagagaagggtgcagaagctgccaatgtgactggcccggatggagttcctgtggaagggagtcgttacgctgcagatcggcgccgttacagacgtggctactatggaaggcgccgtggccctccccggaattacgctggggaggaggaggaggaagggagcggcagcagtgaaggatttgacccccctgccactgataggcagttctctggggcccggaatcagctgcgccgcccccagtatcgccctcagtaccggcagcggcggttcccgccttaccacgtgggacagacctttgaccgtcgctcacgggtcttaccccatcccaacagaatacaggctggtgagattggagagatgaaggatggagtcccagagggagcacaacttcagggaccggttcatcgaaatccaacttaccgcccaaggtaccgtagcaggggacctcctcgcccacgacctgccccagcagttggagaggctgaagataaagaaaatcagcaagccaccagtggtccaaaccagccgtctgttcgccgtggataccggcgtccctacaattaccggcgtcgcccgccgtcctcctaacgctccttcacaagatggcaaagaggccaaggcaggtgaagcaccaactgagaaccctgctccacccacccagcagagcagtgtgagtaacaccaggctcctcaggcaccttcaccatcggcaggtggacctaaagaattagatgaccattcagaaataaagcaaaaagcaggccacataccttaaccaacaccaaagaaacatccaagcaataaagtggaagactaaccaagatttggacattggaatgtttactgttattctttaagaaacaactacaaaaagaaaatgtcaacaaatttttccagcaagctgagaacctggaattc

SEQ ID NO: 421 - DNA, 565 bp, Homo sapiens
  Genbank Accession No. M26311
aattcgctcggctttgacagagtgcaagacgatgacttgcaaaatgtcgcagctggaacgcaacatagagaccatcatcaacaccttccaccaatactctgtgaagctggggcacccagacaccctgaaccagggggaattcaaagagctggtgcgaaaagatctgcaaaattttctcaagaaggagaataagaatgaaaaggtcatagaacacatcatggaggacctggacacaaatgcagacaagcagctgagcttcgaggagttcatcatgctgatggcgaggctaacctgggcctcccacgagaagatgcacgagggtgacgagggccctggccaccaccataagccaggcctcggggagggcaccccctaagaccacagtggccaagatcacagtggccacggccatggccacagtcatggtggccacggccacaggccactaatcaggaggccaggccaccctgcctctacccaaccagggccccggggcctgttatgtcaaactgtcttggctgtggggctaggggctggggccaaataaagtctcttcctccaagct

SEQ ID NO: 422 - DNA, 213 bp, Homo sapiens
  Genbank Accession No. M28590
ccaccgaaagtactgaccaagtgccaggaagaggtcagccacatccctgctgtccacccgggttcattcaggcccaagtgcgacgagaacggcaactatctgccactccagtgctatgggagcatcggctactgctggtgtgtcttccccaacggcacggaggtccccaacaccagaagccgcgggcaccataactgcagtgagtcactggaa

SEQ ID NO: 423 - DNA, 1045 bp, Homo sapiens
  Genbank Accession No. M29645
caggggccgaagagtcaccaccgagcttgtgtgggaggaggtggattccagcccccagccccagggctctgaatcgctgccagctcagccccctgcccagcctgccccacagcctgagccccagcaggccagagagcccagtcctgaggtgagctgctgtggcctgtggccaggcgaccccagcgctcccagaactgaggctggcagccagccccagcctcagccccaactgcgaggcagagagacaccaatgggaatgccaatggggaagtcgatgctggtgcttctcaccttcttggccttcgcctcgtgctgcattgctgcttaccgccccagtgagaccctgtgcggcggggagctggtggacaccctccagttcgtctgtggggaccgcggcttctacttcagcaggcccgcaagccgtgtgagccgtcgcagccgtggcatcgttgaggagtgctgtttccgcagctgtgacctggccctcctggagacgtactgtgctacccccgccaagtccgagagggacgtgtcgacccctccgaccgtgcttccggacaacttccccagataccccgtgggcaagttcttccaatatgacacctggaagcagtccacccagcgcctgcgcaggggcctgcctgccctcctgcgtgcccgccggggtcacgtgctcgccaaggagctcgaggcgttcagggaggccaaacgtcaccgtcccctgattgctctacccacccaagaccccgcccacgggggcgcccccccagagatggccagcaatcggaagtgagcaaaactgccgcaagtctgcagcccggcgccaccatcctgcagcctcctcctgaccacggacgtttccatcaggttccatcccgaaatctctcggttccacgtccccctggggcttctcctgacccagtccccgtgccccgcctccccgaaacaggctactctcctcggccccctccatcgggctgaggaagcacagcagcatcttcaaacatgtacaaaatcgattggctttaaacaccttcacatacct

SEQ ID NO: 424 - DNA, 1586 bp, Homo sapiens
  Genbank Accession No. M30894
gaatcaggaagaccagctcctcctactgtcttctgtgttacgggatcagcgttccttgttgagtgggacctgagttttgagagggtcttctgctcctcttggtctggtcccttacttccaagagccccagagaggaaggcatgctgttggctctagctctgcttctagctttcctgcctcctgccagtcagaaatcttccaacttggaagggagaacaaagtcagtcaccaggccaactgggtcatcagctgtaatcacttgtgatcttcctgtagaaaatgccgtctacacccactggtacctacaccaggaggggaaggccccacagcgtcttctgtactatgactcctacaactccagggttgtgttggaatcaggaatcagtcgagaaaagtatcatacttatgcaagcacagggaagagccttaaatttatactggaaaatctaattgaacgtgactctggggtctattactgtgccacctggaaggattattataagaaactctttggcagtggaacaacacttgttgtcacagataaacaacttgatgcagatgtttcccccaagcccactatttttcttccttcgattgctgaaacaaaactccagaaggctggaacatatctttgtcttcttgagaaatttttcccagatattattaagatacattggcaagaaaagaagagcaacacgattctgggatcccaggaggggaacaccatgaagactaacgacacatacatgaaatttagctggttaacggtgccagaagagtcactggacaaagaacacagatgtatcgtcagacatgagaataataaaaacggaattgatcaagaaattatctttcctccaataaagacagatgtcaccacagtggatcccaaagacagttattcaaaagatgcaaatgatgtcaccacagtggatcccaaatacaattattcaaaggatgcaaatgatgtcatcacaatggatcccaaagacaattggtcaaaagatgcaaatgatacactactgctgcagctcacaaacacctctgcatattacatgtacctcctcctgctcctcaagagtgtggtctattttgccatcatcacctgctgtctgcttggaagaacggctttctgctgcaatggagagaaatcataacagacggtggcacaaggaggccatcttttcctcatcggttattgtccctagaagcgtcttctgaggatctagttgggctttctttctgggtttgggccatttcagttctcatgtgtgtactattctatcattattgtataatggttttcaaaccagtgggcacacagagaacctcagtctgtaataacaatgaggaatagccatggcgatctccagcaccaatctctccatgttttccacagctcctccagccaacccaaatagcgcctgctatagtgtagacagcctgcggcttctagccttgtccctctcttagtgttctttaatcagataactgcctggaagcctttcattttacacgccctgaagcagtcttctttgctagttgaattatgtggtgtgtttttccgtaataagcaaaataaattt

SEQ ID NO: 425 - DNA, 700 bp, Homo sapiens
  Genbank Accession No. M31994
ttctctctaggggagagtacggtttccatgaatatacagaggtcaaaacagtcacagtgaaaatctctcagaagaactcataaagaaaatacaagagtggagagaagctcttcaatagctaagcatctccttacagtcactaatatagtagattttaaagacaaaatttttcttttcttgattttttttaaacataagctaaatcatattagtattaatactacccatagaaaacttgacatgtagcttcttctgaaagaattatttgccttctgaaatgtgacccccaagtcctatcctaaataaaaaaagacaaattcggatgtatgatctctctagctttgtcatagttatgtgattttcctttgtagctacttttgcaggataataattttatagaaaaggaacagttgcatttagcttctttcccttagtgactcttgaagtacttaacatacacgttaactgcagagtaaattgctctgttcccagtagttataaagtccttggactgttttgaaaagtttcctaggatgtcatgtctgcttgtcaaaagaaataatccctgtaatatttagctgtaaactgaatataaagcttaataaaaacaaccttgcatgattcttgttacttttgaatttttttaagtacaagttttggtcacagtgatttcttcttgtcacttaaaaacagtgttaaa

SEQ ID NO: 426 - DNA, 1268 bp, Homo sapiens
  Genbank Accession No. M33197
gttcgacagtcagccgcatcttcttttgcgtcgccagccgagccacatcgctcagacaccatggggaaggtgaaggtcggagtcaacggatttggtcgtattgggcgcctggtcaccagggctgcttttaactctggtaaagtggatattgttgccatcaatgaccccttcattgacctcaactacatggtttacatgttccaatatgattccacccatggcaaattccatggcaccgtcaaggctgagaacgggaagcttgtcatcaatggaaatcccatcaccatcttccaggagcgagatccctccaaaatcaagtggggcgatgctggcgctgagtacgtcgtggagtccactggcgtcttcaccaccatggagaaggctggggctcatttgcaggggggagccaaaagggtcatcatctctgccccctctgctgatgcccccatgttcgtcatgggtgtgaaccatgagaagtatgacaacagcctcaagatcatcagcaatgcctcctgcaccaccaactgcttagcacccctggccaaggtcatccatgacaactttggtatcgtggaaggactcatgaccacagtccatgccatcactgccacccagaagactgtggatggcccctccgggaaactgtggcgtgatggccgcggggctctccagaacatcatccctgcctctactggcgctgccaaggctgtgggcaaggtcatccctgagctgaacgggaagctcactggcatggccttccgtgtccccactgccaacgtgtcagtggtggacctgacctgccgtctagaaaaacctgccaaatatgatgacatcaagaaggtggtgaagcaggcgtcggagggccccctcaagggcatcctgggctacactgagcaccaggtggtctcctctgacttcaacagcgacacccactcctccacctttgacgctggggctggcattgccctcaacgaccactttgtcaagctcatttcctggtatgacaacgaatttggctacagcaacagggtggtggacctcatggcccacatggcctccaaggagtaagacccctggaccaccagccccagcaagagcacaagaggaagagagagaccctcactgctggggagtccctgccacactcagtcccccaccacactgaatctcccctcctcacagttgccatgtagaccccttgaagaggggaggggcctagggagccgcaccttgtcatgtaccatcaataaagtaccctgtgctcaacc

SEQ ID NO: 427 - DNA, 1081 bp, Homo sapiens
  Genbank Accession No. M33493
gctgcccgtcctggcgagccgcgcctacgcggcccctgccccaggccaggccctgcagcgagtgggcatcgttgggggtcaggaggcccccaggagcaagtggccctggcaggtgagcctgagagtccgcgaccgatactggatgcacttctgcgggggctccctcatccacccccagtgggtgctgaccgcagcgcactgcgtgggaccggacgtcaaggatctggccgccctcagggtgcaactgcgggagcagcacctctactaccaggaccagctgctgccggtcagcaggatcatcgtgcacccacagttctacaccgcccagatcggagcggacatcgccctgctggagctggaggagccggtgaaggtctccagccacgtccacacggtcaccctgccccctgcctcagagaccttccccccggggatgccgtgctgggtcactggctggggcgatgtggacaatgatgagcgcctcccaccgccatttcctctgaagcaggtgaaggtccccataatggaaaaccacatttgtgacgcaaaataccaccttggcgcctacacgggagacgacgtccgcatcgtccgtgacgacatgctgtgtgccgggaacacccggagggactcatgccagggcgactccggagggcccctggtgtgcaaggtgaatggcacctggctgcaggcgggcgtggtcagctggggcgagggctgtgcccagcccaaccggcctggcatctacacccgtgtcacctactacttggactggatccaccactatgtccccaaaaagccgtgagtcaggcctggggtgtccacctgggtcactggaggaccagcccctcctgtccaaaacaccactgcttcctacccaggcggcgactgccccccacaccttccctgccccgtcctgagtgccccttcctgtcctaagccccctgctctcttctgagccccttcccctgtcctgaggacccttccccatcctgagcccccttccctgtcctaagcctgacgcctgcaccgggccctccggccctcccctgcccaggcagctggtggtgggcgctaatcc

SEQ ID NO: 428 - DNA, 1056 bp, Homo sapiens
  Genbank Accession No. M33653
agatccggacgctggccttgatggggcctcttggtcttcttgggcaaattggcccacttggagctctagggatgctaggccagaagggggagattggactgctaggccctctaggacacgatgggaaaggacctcgcggtaaactaggagacatgggccctcttggtccccaaggccccctaggaaaggatggacctccaggagtgaagggagaaaacgggcacccagggagcccaggagagaagggggaaaaaggggagacaggacaagcaggctcaccggttcctgggctgctagggccagaggggcctcccggacctccggggctccaaggtgttcctggaccaaagggggaagcaggactagacggagcaaaaggagagaaaggcttccagggagaaaaaggagaccgtggtcccctgggactacccggagcttcaggtttggacggcaggcctgggccaccgggtactccaggaccaattggagttccaggcccagcgggaccaaagggcgagaggggcagcaaaggagaccctgggatgacaggaccaacgggagcagctgggcttcctggtttacatggaccacccggggacaagggaaaccggggggagagggggaagaaaggctctagagggcctaaaggggacaagggagaccaaggagcgcctggattagatgccccctgcccattggggcaagatggcttaccagtccaaggctgctggaacaagtgatgcctctaaccttggattggcctgtgtgtgtgtttgtacatagaatatttatttttatacagttttcactttttgaaaatgccagaagtatgatgcatcttacagattattaaaaaagaaagaaaaaccgttgcatattttgtacagaaaatatcaacctcttcccttttgtttacaagatgttttgtataagcctatgtctctaatacattttttgtttggtcgtaatgtctgcatgatatttgtgcacatttattaagtatcgaaggttaataaattgttgtgtcctggtgccaaggggggccagccagaactg

SEQ ID NO: 429 - DNA, 1238 bp, Homo sapiens
  Genbank Accession No. M34338
cggcggagctggtcccgttgtgctgcggcgccgcgcggcctgcagtcccgggcccgcgccccgcgccgcccgcccgcccgccatggagcccggccccgacggccccgccgcctccggccccgccgccatccgcgagggctggttccgcgagacctgcagcctgtggcccggccaggccctgtcgctgcaggtggagcagctgctccaccaccggcgctcgcgctaccaggacatcctcgtcttccgcagtaagacctatggcaacgtgctggtgttggacggtgtcatccagtgcacggagagagacgagttctcctaccaggagatgatcgccaacctgcctctctgcagccaccccaacccgcgaaaggtgctgatcatcgggggcggagatggaggtgtcctgcgggaggtggtgaagcacccctccgtggagtccgtggtccagtgtgagatcgacgaggatgtcatccaagtctccaagaagttcctgccaggcatggccattggctactctagctcgaaggtgaccctacatgtgggtgacggttttgagttcatgaaacagaatcaggatgccttcgacgtgatcatcactgactcctcagaccccatgggccccgccgaaagtctcttcaaggagtcctattaccagctcatgaagacagccctcaaggaagatggtgtcctctgctgccagggcgagtgcgagtggctgcacctggacctcatcaaggagatgcggcagttctgccagtccctgttccccgtggtggcctatgcctactgcaccatccccacctaccccagcggccagatcggcttcatgctgtgcagcaagaacccgagcacgaacttccaggagccggtgcagccgctgacacagcagcaggtggcgcagatgcagctgaagtactacaactccgacgtgcaccgcgccgcctttgtgctgcccgagtttgcccgcaaggccctgaatgatgtgagctgagcccaggcgccaccactgatgccacccaggacctcggaccttggagcctgcggggtgcctcggcccctccagccccgggccggacctcctgctggctctcgcccaccaaccaagtgttacaagccccagaatgctgcccggcctgccctgctgggcggactgtctgtgtgtctgtctctctggcgttccacctccaagcctataccagctgtgtacagcgccatctctctgccttctgttgcccccg

SEQ ID NO: 430 - DNA, 468 bp, Homo sapiens
  Genbank Accession No. M34516
tcctctgtccacacaggtcagcccaaggccaccccctcggtcactctgttcctgccgtcctctgaggagctccaagccaacaaggccacactggtgtgtctcatgaatgacttctatctgggaatcttgacggtgacctggaaggcagatggtacccccatcacccagggcgtggagatgaccacgccctccaaacagagcaacagcaagtacatggccagcagctacctgagcctgacgcccgagcagtggaggtcccgcagaagctacagctgccaggtcatgcacgaagggagcactgcagagaagacggtggcccctgcagaatgttcataggttcccagcccccagcccacccacaggaggcctggagctgcaggatcccaggggaggggtctctctccccatcccaagtcatccagcccttctccctgcactcatgaaaccccaataaatatcctcattgac

SEQ ID NO: 431 - DNA, 1060 bp, Homo sapiens
  Genbank Accession No. M34996
gccctgaccaccgtgatgagcccctgtggaggtgaagacattgtggctgaccacgttgcctcttgtggtgtaaacttgtaccagttttacggtccctctggccagtacacccatgaatttgatggagatgaggagttctacgtggacctggagaggaaggagactgcctggcggtggcctgagttcagcaaatttggaggttttgacccgcagggtgcactgagaaacatggctgtggcaaaacacaacttgaacatcatgattaaacgctacaactctaccgctgctaccaatgaggttcctgaggtcacagtgttttccaagtctcccgtgacactgggtcagcccaacaccctcatttgtcttgtggacaacatctttcctcctgtggtcaacatcacatggctgagcaatgggcagtcagtcacagaaggtgtttctgagaccagcttcctctccaagagtgatcattccttcttcaagatcagttacctcaccttcctcccttctgctgatgagatttatgactgcaaggtggagcactggggcctggaccagcctcttctgaaacactgggagcctgagattccagcccctatgtcagagctcacagagactgtggtctgcgccctggggttgtctgtgggcctcgtggcctttgtggtgggcactgtcttcatcatccaaggcctgcgttcagttggtgcttccagacaccaagggccattgtgaatcccatcctggaagggaaggtgcatcgccatctacaggagcagaagagtggacttgctacatgacctagcactattctctggccccgatttatcatatcccttttctcctccaaatatttctcctctcaccttttctctgggacttaagctgctatatcccctcagagctcacaaatgtctttacattctttccctgacctcctgattttttttttcttttctcaaatgttacctacaaagacatgcctggggtaacccagccggctacctaattcctcagtaacctccatctataatctccaaggaagcaacaaattccttttatg

SEQ ID NO: 432 - DNA, 1104 bp, Homo sapiens
  Genbank Accession No. M35252
ctctagagtcgagatccattgtgctctaaagtggatacagaaatctctgcaggcaagttgctccagagcatattgcaggacaagcctgtaacgaatagttaaattcacggcatctggattcctaatccttttccgaaatggcaggtgtgagtgcctgtataaaatattctatgtttaccttcaacttcttgttctggctatgtggtatcttgatcctagcattagcaatatgggtacgagtaagcaatgactctcaagcaatttttggttctgaagatgtaggctctagctcctacgttgctgtggacatattgattgctgtaggtgccatcatcatgattctgggcttcctgggatgctgcggtgctataaaagaaagtcgctgcatgcttctgttgtttttcataggcttgcttctgatcctgctcctgcaggtggcgacaggtatcctaggagctgttttcaaatctaagtctgatcgcattgtgaatgaaactctctatgaaaacacaaagcttttgagcgccacaggggaaagtgaaaaacaattccaggaagccataattgtgtttcaagaagagtttaaatgctgcggtttggtcaatggagctgctgattggggaaataattttcaacactatcctgaattatgtgcctgtctagataagcagagaccatgccaaagctataatggaaaacaagtttacaaagagacctgtatttctttcataaaagacttcttggcaaaaaatttgattatagttattggaatatcatttggactggcagttattgagatactgggtttggtgttttctatggtcctgtattgccagatcgggaacaaatgaatctgtggatgcatcaacctatcgtcagtcaaacccctttaaaatgttgctttggctttgtaaatttaaatatgtaagtgctatataagtcaggagcagctgtctttttaaaatgtctcggctagctagaccacagatatcttctagacatattgaacacatttaagatttgagggatataagggaaaatgatatgaatgtgtatttttactcaaaataaaagtaactgtttaaaaaaaaaaaaaaaaaaaaa

SEQ ID NO: 433 - DNA, 4567 bp, Homo sapiens
  Genbank Accession No. M37984
cctcgcccgccccgcgcgtgactgacagggccactcagggcgcgcgtgcgaggtgctcgcttgggtaatctacctgcgtgggcccgccggcggtaccctgcacagcctgctagaaactgagaccccgggtggtgacagctctggcatcgcccctgggtcctcgggaagaggggacagaaggtcccgagtctcccaggccacacgaagcaagtcactgctcttcctggcctcagtttactcctcctgataaaggaggccataatagtgcctcacctggctgttggctctttctctttagggcaaggcaggttggaggggaaaataggacctgtgcttaccgccggagcagggcgagagtgattctgggccagttctgaacctctctgagattcggagatctcttgtcagtggggcttctggacaactgagtgggctgattgatgcgcggcccagcacgcggcccagtgctcgaggcagggagcgtgtttatcaagagggataaacttgatacgaactctgtacgaaggaaggtgtaggtggatggaggggtgtgtgctgccactgagcacaagaacccacggggtggcctgccaaagttcaaaacgagggagacaggttgatctggacccaggaactacagtgctgaatcctaaaccggggaaagatgagacctagaagagggaggtggtaacctaattggagggtgaggagggaaagagcctgccacagatggggcatctataggggtgctgttgataacagagcagctgacttaagcccgaagtgggtacttctccctgggcagatgggaggtctgggacaggctcctctggcagaagggctcctggccaccctgtcctaaggtgggtcagtcacttcctccttcaccagttccacagcatcttactatgagcttggcattcgaggcttctcttggcagggccctgcactcctagcctctccttgcacattgcacccccattccagagaggtttagttaaaggcgggggttaccaagtcagtcagatcttgggcaagtcaccactcctccagagcctcagtttccttatctggaaagtggaggtcatggcaacccgccaacctggttggatgggagcctgagctgttgtgttgcaccttgcctggggcccacgactttgtagctcctgtcctgcactgggcttatgttttcattcattccagaaaccttttcagagagtccctttggggagtgtgggggacaggagggaaagaaacctggtccttgtagccgttcgtctgctccctgccctgggcagaggacatggggactcaggccagcctgagatcactgggaccagaggaggggctggaggatactacacgcaggggtgggctgggctgggctgggctgggccaggaatgcagcggggcagggctatttaagtcaagggccggctggcaaccccagcaagctgtcctgtgagccgccagcatggatgacatctacaaggctgcggtgagggacagggctgggtagggctggggtgggcaggcccactgggggctcactcagctgagagtgcggggttagtagccccagggaagtggtggggaccaaggagaaggcctacgtgccttcaacccaggccctcacagggacagtgattctggtgtttgaggatgcagaagggggtagggggttccgggtctgaagggtggtggaggaggttgcagctttctgatcgtgtctcactctctgtttccaagtgtctgtggtctgtggcactgtcgctcagccacatgtctctgcatttgtctctggacgtttttgccttcctcttttcatctcttcctcctgagctgtctgagtccccattactgtctccctgtccccaacccccactttctgcccctcacattctgcttctcacatgctcaaaatctgccacccactccagcccttggcgggccgaagatgcttggagggtggagggtgtgagaggaggggtctgtagagcctgagtcctgggctggagatggggctttgaagtttgaggcagggaagttctggacatgagggagaaccaaggaagaaggaacagagaactggggccccagctcccatcatgcctggcaggctcagggctcagtggcttagctaggggtgagagcgagggaatgagggctggagagtggtcaccccaagcccctgcaacctcctgggtcactgagggtcttcagatgctattctatcctgggtggtggtacctccccaacccagagcaaggacatcctggcatggccagctgtccccaggggaacccctccctcagcctccctcactcctgggcagggaagtgctatagccagctctgggggcacgcctgcttatcctgtgggagtccatggagccggggtggggacagccctccacccagtgcccatacaaggcctggcggagttggggactaattttggcttctgaggcggcactagcagccagggggccagataacgctgccccctgcatgccaaagtccccagaacaatcaccaggtttcactttgttcctcgttaaaaatagcccagtggccaccctggtcaggttaccgtgggtggcttgcctgcctccacactggttttattatcccaacttagggacagctgtccttccggcccacccagcttgagtttcatcaggggccgaaagggcattgagtggtcactgactattgttactgagggtcaccttggtcctgaagggggtgcccacctgtcaccctggccctgagcccagtcgcagtgaggccagctgggtcacgtcagggctttgggggcagggagggaggactgagacctccactctgtggcctggaaatagccagcctcctccagctccagccttctcacctgtggaatgggttggttcctacgcagcagctatacctgagtctgagaccttgagattccctttccttctaggtagagcagctgacagaagagcagaaaaatggtgagaatccctatcacacatgtgggagaccagcgggtccaggctggcatggggaccccttatcagaagaggaccccaggccagagaccagaggcttggtccctcttgctctgccctcagagaggtctccgagggaggtgggcaggttggcaggtggccccagggttctggccctccgtggtcctggctgctgagccctgactaccgtgccccccaacccctgaacacagagttcaaggcagccttcgacatcttcgtgctgggcgctgaggatggctgcatcagcaccaaggagctgggcaaggtgatgaggatgctgggccagaaccccacccctgaggagctgcaggagatgatcgatgaggtggacgaggacggtgagcccccctcctccccaggctccagaagaaccccagctggctgggggctggaatgctggctctgtttagctgggagcaatttagcctatccgagccttggttgcctcatctataaaatgggcataagggctacacaagcctggcgtttggtgtgaggatgcggtgagaacatgggggttcgtgtcgaaggtgctgcctgcagtacctaccctggcctctgtaacggccatgctgcccacccccaggcagcggcacggtggactttgatgagttcctggtcatgatggttcggtgcatgaaggacgacagcaaagggaaatctgaggaggagctgtctgacctcttccgcatgtttgacaagtgagcacgtgacccttgacctctgaccctgacccacactcaagccgagctgtacaggagggcagtctcagattccaggcctagggaccctgtggcctctgcctgataggggagagggatgccccatctcccagtgtccctgctctgcctcctggggcatgggtggggctgcctcatgccctccccacagccctaccctgagccccctccccacagaaatgctgatggctacatcgacctggatgagctgaagataatgctgcaggctacaggcgagaccatcacggaggacgacatcgaggagctcatgaaggacggagacaagaacaacgacggccgcatcgactatgatggtaagcgggtgggtgggctgatctcctgcctccatgccctgcccagcccctaccctcaacccacacctgcccctctttccacagagttcctggagttcatgaagggtgtggagtagatgctgaccttcacccagagctgcctatgcccagcctccaactccagctgagtcctggggttggggagggggtcggggtcccaggacctgagcctggccatgtcctcaaccccaaatcccccgactccctccccagatctgtcctgggggatgcaaataaagcctgctctcccaaggtctgctatctggctctggtgtccctgggccgtggactcatccccaggacccactcttacccaatggccgcttccttccctgtcctaggcaggctggctgcagagcctggcgcctgaccaccgctccacactgccttctgcaggggggtgagatgagatcggagactgccgtgtggcctgccctgct

SEQ ID NO: 434 - DNA, 1104 bp, Homo sapiens
  Genbank Accession No. M57466
tgcagcacctatttccaattgtgtatggcctcgagtaccaggtctcgcctccaggatggtcctgcaggtttctgcggccccccggacagtggctctgacggcgttactgatggtgctgctcacatctgtggtccaaggcagggccactccagagaattacgtgcaccagttacggcaggaatgctacggctttaatgggacacagcgcttcctagagagttacatctacaaccgggaggagttcgtgcgcttcgacagcgacgtgggggagttccgggcggtgacggagctggggcggcctgatgaggactactggaacagccagaaggacatcctggaggaggagcgggcagtgccggacagggtatgcagacgcaactacgagctggacgaggccgtgaccctgcagcgccgagtccagcctaaggtgaacgtttccccctccaagaaggggcccctgcagcaccacaacctgcttgtctgccacgtgacagatttctacccaagcagcattcaagtccgatggttcctgaatggacaggaggaaacagctggggtcgtgtccaccaacctgatccgtaatggagactggaccttccagatcctggtgatgctggaaatgaccccccagcagggagacgtctacatctgccaagtggagcacaccagcctggacagtcctgtcaccgtggagtggaaggcacagtctgattctgcccagagtaagacattgacgggagctgggggcttcgtgctggggctcatcatctgtggagtgggcatcttcatgcacaggaggagcaagaaagttcaacgaggatctgcataaacagggttcctgacctcaccgaaaagactaatgtgccttagaacaagcatttgctgtgttttgttaagtagtggttccaggacagaccctcagcttcccaagaggaaactgctgccaagaagttgctctgaaggcagtttctatcgttctgcgctttgattcaaagcactgtttctctcactgggcctccaaccatgttcccttcttcttagcaccacaaataatcaaaacccaacataagtgtttgttttcctttaaaaatatgcatcaaaaaa

SEQ ID NO: 435 - DNA, 2153 bp, Homo sapiens
  Genbank Accession No. M60314
ctggtatatttgtgcctgctggaggtggaattaacagtaagaaggagaaagggattgaatggacttacaggaaggatttcaagtaaattcagggaaacacatttacttgaatagtacaacctagagtattattttacactaagacgacacaaaagatgttaaagttatcaccaagctgccggacagatatatattccaacaccaaggtgcagatcagcatagatctgtgattcagaaatcaggatttgttttggaaagagctcaagggttgagaagaactcaaaagcaagtgaagattactttgggaactacagtttatcagaagatcaacttttgctaattcaaataccaaaggcctgattatcataaattcatataggaatgcataggtcatctgatcaaataatattagccgtcttctgctacatcaatgcagcaaaaactcttaacaactgtggataattggaaatctgagtttcagctttcttagaaataactactcttgacatattccaaaatatttaaaataggacaggaaaatcggtgaggatgttgtgctcagaaatgtcactgtcatgaaaaataggtaaatttgttttttcagctactgggaaactgtacctcctagaaccttaggtttttttttttttaagaggacaagaaggactaaaaatatcaacttttgcttttggacaaaaatgcatctgactgtatttttacttaagggtattgtgggtttcctctggagctgctgggttctagtgggttatgcaaaaggaggtttgggagacaatcatgttcactccagttttatttatagaagactacggaaccacgaaagacgggaaatacaaagggaaattctctctatcttgggtttgcctcacagacccagaccattttcacctggaaaacaagcgtcctctgcacctctctttatgctggatctctacaatgccatgaccaatgaagaaaatcctgaagagtcggagtactcagtaagggcatccttggcagaagagaccagaggggcaagaaagggatacccagcctctcccaatgggtatcctcgtcgcatacagttatctcggacgactcctctgaccacccagagtcctcctctagccagcctccatgataccaactttctgaatgatgctgacatggtcatgagctttgtcaacttagttgaaagagacaaggatttttctcaccagcgaaggcattacaaagaatttcgatttgatcttacccaaattcctcatggagaggcagtgacagcagctgaattccggatatacaaggaccggagcaacaaccgatttgaaaatgaaacaattaagattagcatatatcaaatcatcaaggaatacacaaatagggatgcagatctgttcttgttagacacaagaaaggcccaagctttagatgtgggttggcttgtctttgatatcactgtgaccagcaatcattgggtgattaatccccagaataatttgggcttacagctctgtgcagaaacaggggatggacgcagtatcaacgtaaaatctgctggtcttgtgggaagacagggacctcagtcaaaacaaccattcatggtggccttcttcaaggcgagtgaggtacttcttcgatccgtgagagcagccaacaaacgaaaaaatcaaaaccgcaataaatccagctctcatcaggactcctccagaatgtccagtgttggagattataacacaagtgagcaaaaacaagcctgtaagaagcacgaactctatgtgagcttccgggatctgggatggcaggactggattatagcaccagaaggatacgctgcattttattgtgatggagaatgttcttttccacttaacgcccatatgaatgccaccaaccacgctatagttcagactctggttcatctgatgtttcctgaccacgtaccaaagccttgttgtgctccaaccaaattaaatgccatctctgttctgtactttgatgacagctccaatgtcattttgaaaaaatatagaaatatggtagtacgctcatgtggctgccactaatattaaataatattgataataacaaaaagatctgtattaaggtttatggctgcaataaaaagcatactttcagacaaacagaaaaaaaaa

SEQ ID NO: 436 - DNA, 1568 bp, Homo sapiens
  Genbank Accession No. M61764
cgcaacgccggtgcctgaggagcgatgccgagggaaatcatcaccctacagttgggccagtgcggcaatcagattgggttcgagttctggaaacagctgtgcgccgagcatggtatcagccccgaggcgatcgtggaggagttcgccaccgagggcactgaccgcaaggacgtctttttctaccaggcagacgatgagcactacatcccccgggccgtgctgctggacttggaaccccgggtgatccactccatcctcaactccccctatgccaagctctacaacccagagaacatctacctgtcggaacatggaggaggagctggcaacaactgggccagcggattctcccagggagaaaagatccatgaggacatttttgacatcatagaccgggaggcagatggtagtgacagtctagagggctttgtgctgtgtcactccattgctggggggacaggctctggactgggttcctacctcttagaacggctgaatgacaggtatcctaagaagctggtgcagacatactcagtgtttcccaaccaggacgagatgagcgatgtggtggtccagccttacaattcactcctcacactcaagaggctgacgcagaatgcagactgtctggtggtgctggacaacacagccctgaaccggattgccacagaccgcctgcacatccagaacccatccttctcccagatcaaccagctggtgtctaccatcatgtcagccagcaccaccaccctgcgctaccctggctacatgaacaatgacctcatcggcctcatcgcctcgctcattcccaccccacggctccacttcctcatgaccggctacacccctctcactacggaccagtcagtggccagcgtgaggaagaccacggtcctggatgtcatgaggcggctgctgcagcccaagaacgtgatggtgtccacaggccgagaccgccagaccaaccactgctacatcgccatcctcaacatcatccagggagaggtggaccccacccaggtccacaagagcttgcagaggatccgggaacgcaagttggccaacttcatcccgtggggccccgccagcatccaggtggccctgtcgaggaagtctccctacctgccctcggcccaccgggtcagcgggctcatgatggccaaccacaccagcatctcctcgctcttcgagagaacctgtcgccagtatgacaagctgcgtaagcgggaggccttcctggagcagttccgcaaggaggacatgttcaaggacaactttgatgagatggacacatccagggagattgtgcagcagctcatcgatgagtaccatgcggccacacggccagactacatctcctggggcacccaggagcagtgagtcccccaggacaggggaccctcatctgccttactggttggcccaagccctgcctgactgaccaccccctcagagcacagatcagggacctcacgcatctctttctcatatacatggactctctgttggcctgcaaacacatttacttctcctcttatgagactatttatctttaataaagcactggg

SEQ ID NO: 437 - DNA, 1811 bp, Homo sapiens
  Genbank Accession No. M62831
ggtttgtgtagagaggcgtgcagagcccgttgtccggagtgcacctgctgcctgttctgtccctcccgggagcccccgccgctgtcgccgtcgagtcgccatggaagtgcagaaagaggcacagcgcatcatgaccctgtcggtgtggaagatgtatcactcccgcatgcagcgcggtggcctgcggctgcaccggagtctgcagctgtcgctggtcatgcgcagcgcccgggagctctacctctcggccaaggtggaggccctcgagcccgaggtgtcgttgccggccgccctcccctctgaccctcgcctgcacccgccccgagaagccgagtccacggccgagacagcgacccccgacggtgagcacccgtttccggagccaatggacacgcaggaggcgccgacagccgaggagacctccgcctgctgtgccccgcgccccgccaaagtcagccgcaaacgacgcagcagcagcctgagcgacggcggggacgttggactggtcccgagcaagaaagcccgtctggaagaaaaggaagaagaggagggagcgtcatccgaagtcgccgatcgcctgcagccccctccgggccaagcggagggcgcctttcccaacctggcccgcgtcctgcagaggcgcttctccggcctcctgaactgcagccccgcggcccctccgacggcgccgcccgcgtgcgaggcaaagcccgcttgccgcccggcggacagcatgctcaacgtgctcgtgcgggccgtggtggccttctgaggaccccgagcggcgctgccggagcccagagcgcgcgtcgaaccgtcggcccgagggcgcagacctgaggcgaggccacccccctccatcctgggggaagcgcccgcgaaaaccgtggagagaagccgccgcccgggctgctgagaggcccggagaggactctgtccccggggagccatcgccttcagtgtgcagggacggcaccgaggagtctgagccgggcgcgggcgccttccgcagagacctgcgcccacaggtgctgtcttagtggactgggacgtgaacctttcgctctccttctggactgggagaagggaggcttgggtgttgtgttttttgttttgtttgtttgtttgtttttaaagatctcctcagggtcggacttcattttgtactgtgggctgtgctggccctttcaaggtttttcaagagttggttttgcgtttccaacctcggagaattccaggcactccccttccccctccgctgacatacttgtataagcggtcatcgttgcgtcatggggcaggcgtggggagcttcctgtcgccttggctgggtgtgggcctggaggaaggtcctggggcgtgcactcgcctgggcagtggggaggagagtggcctgagttacttcacccccgcgtgctgctggttaatgtcccgcgtctctgcaccttcgggtgggagcggggactgatctactttcacattctcaagtttttctcatctgcattagaggtccccagtaggttcccaggttccagcgtgcccctccctcagacacacggacacaatcagccgagaagttcctggtctgaatcacgagaatgtggaggggtggggggtgtcagtggaaaggcataaggctgagctgagaccagttgctggtgaaactgggccaatctggggaggggaacatccttgccagggagtttctgagggtctgctttgtttacctttcgtgcggtggattctttttaactccgtctacctggcgttttgttagaaatgtcagataggaaaataaaaaccatttgagt

SEQ ID NO: 438 - DNA, 1244 bp, Homo sapiens
  Genbank Accession No. M63438
atggaagccccagctcagcttctcttcctcctgctactctggctcccagataccaccggagaaattgtgttgacacagtctccagccaccctgtctttgtctccaggggaaagagccaccctctcctgcagggccagtcagagtgttggcagctacttagcctggtaccaacagaaacctggccaggctcccaggcccctcatctatgatgcatccaacagggccactggcatcccagccaggttcagtggcagtgggtctgggacagacttcactctcaccatcagcagcctagagcctgaagattttgcagtttattactgtcaacaccgtgacaattggcctccgggggccactttcggcggagggaccaaggtggagatcaaacataccaccggagaaattgtgttgacacagtctccagccaccctgtctttgtctccaggggaaagagccaccctctcctgcagggccagtcagagtgttggcagctacttagcctggtaccaacagaaacctggccaggctcccaggcccctcatctatgatgcatccaacagggccactggcatcccagccaggttcagtggcagtgggtctgggacagacttcactctcaccatcagcagcctagagcctgaagattttgcagtttattactgtcaacaccgtgacaattggcctccgggggccactttcggcggagggaccaaggtggagatcaaacgaactgtggctgcaccatctgtcttcatcttcccgccatctgatgagcagttgaaatctggaactgcctctgttgtgtgcctgctgaataacttctatcccagagaggccaaagtacagtggaaggtggataacgccctccaatcgggtaactcccaggagagtgtcacagagcaggacagcaaggacagcacctacagcctcagcagcaccctgacgctgagcaaagcagactacgagaaacacaaagtctacgcctgcgaagtcacccatcagggcctgagctcgcccgtcacaaagagcttcaacaggggagagtgttagagggagaagtgcccccacctgctcctcagttccagcctgaccccctcccatcctttggcctctgaccctttttccacaggggacctacccctattgcggtcctccagctcatctttcacctcacccccctcctcctccttggctttaattatgctaatgttggaggagaatgaataaataaagtgaatctttgc

SEQ ID NO: 439 - DNA, 893 bp, Homo sapiens
  Genbank Accession No. M63573
gggtttcgcctccgcctgtggatgctgcgcctctccgaacgcaacatgaaggtgctccttgccgccgccctcatcgcggggtccgtcttcttcctgctgctgccgggaccttctgcggccgatgagaagaagaaggggcccaaagtcaccgtcaaggtgtattttgacctacgaattggagatgaagatgtaggccgggtgatctttggtctcttcggaaagactgttccaaaaacagtggataattttgtggccttagctacaggagagaaaggatttggctacaaaaacagcaaattccatcgtgtaatcaaggacttcatgatccagggcggagacttcaccaggggagatggcacaggaggaaagagcatctacggtgagcgcttccccgatgagaacttcaaactgaagcactacgggcctggctgggtgagcatggccaacgcaggcaaagacaccaacggctcccagttcttcatcacgacagtcaagacagcctggctagatggcaagcatgtggtgtttggcaaagttctagagggcatggaggtggtgcggaaggtggagagcaccaagacagacagccgggataaacccctgaaggatgtgatcatcgcagactgcggcaagatcgaggtggagaagccctttgccatcgccaaggagtagggcacagggacatctttctttgagtgaccgtctgtgcaggccctgtagtccgccacagggctctgagctgcactggccccggtgctggcatctggtggagcggacccactcccctcacattccacaggcccatggactcacttttgtaacaaactcctaccaacactgaccaataaaaaaaaatgtgggttttttttttttttaatataaaaaaacccccc

SEQ ID NO: 440 - DNA, 2156 bp, Homo sapiens
  Genbank Accession No. M64673
cgggcccgttgcaagatggcggcggccatgctgggccccggggctgtgtgtgcgcagcgggcggcggcgcggcccggaaggctggcgcggcgacggcgttagcccggccctcggcccctctttgcggccgctccctccgcctattccctccttgctcgagatggatctgcccgtgggccccggcgcggcggggcccagcaacgtcccggccttcctgaccaagctgtggaccctcgtgagcgacccggacaccgacgcgctcatctgctggagcccgagcgggaacagcttccacgtgttcgaccagggccagtttgccaaggaggtgctgcccaagtacttcaagcacaacaacatggccagcttcgtgcggcagctcaacatgtatggcttccggaaagtggtccacatcgagcagggcggcctggtcaagccagagagagacgacacggagttccagcacccatgcttcctgcgtggccaggagcagctccttgagaacatcaagaggaaagtgaccagtgtgtccaccctgaagagtgaagacataaagatccgccaggacagcgtcaccaagctgctgacggacgtgcagctgatgaaggggaagcaggagtgcatggactccaagctcctggccatgaagcatgagaatgaggctctgtggcgggaggtggccagccttcggcagaagcatgcccagcaacagaaagtcgtcaacaagctcattcagttcctgatctcactggtgcagtcaaaccggatcctgggggtgaagagaaagatccccctgatgctgaacgacagtggctcagcacattccatgcccaagtatagccggcagttctccctggagcacgtccacggctcgggcccctactcggccccctccccagcctacagcagctccagcctctacgcccctgatgctgtggccagctctggacccatcatctccgacatcaccgagctggctcctgccagccccatggcctcccccggcgggagcatagacgagaggcccctatccagcagccccctggtgcgtgtcaaggaggagccccccagcccgcctcagagcccccgggtagaggaggcgagtcccgggcgcccatcttccgtggacaccctcttgtccccgaccgccctcattgactccatcctgcgggagagtgaacctgcccccgcctccgtcacagccctcacggacgccaggggccacacggacaccgagggccggcctccctcccccccgcccacctccacccctgaaaagtgcctcagcgtagcctgcctggacaagaatgagctcagtgaccacttggatgctatggactccaacctggataacctgcagaccatgctgagcagccacggcttcagcgtggacaccagtgccctgctggacctgttcagcccctcggtgaccgtgcccgacatgagcctgcctgaccttgacagcagcctggccagtatccaagagctcctgtctccccaggagccccccaggcctcccgaggcagagaacagcagcccggattcagggaagcagctggtgcactacacagcgcagccgctgttcctgctggaccccggctccgtggacaccgggagcaacgacctgccggtgctgtttgagctgggagagggctcctacttctccgaaggggacggcttcgccgaggaccccaccatctccctgctgacaggctcggagcctcccaaagccaaggaccccactgtctcctagaggccccggaggagctgggccagccgcccacccccacccccagtgcagggctggtcttggggaggcagggcagcctcgcggtcttgggcactggtgggtcggccgccatagccccagtaggacaaacgggctcgggtctgggcagcacctctggtcaggagggtcaccctggcctgccagtctgccttcccccaaccccgtgtcctgtggtttggttggggcttcacagccacacctggactgaccctgcaggttgttcatagtcagaattgtattttggatttttacacaactgtcccgttccccgctccacagagatacacagatatatacacacagtggatggacggacaagacaggcagagatctataaacagacaggctctaaaaaaaaaaaaaaaaaaaa

SEQ ID NO: 441 - DNA, 4732 bp, Homo sapiens
  Genbank Accession No. M68519
tccagcctgagtgttctgcagggaaatgtgctgtgtaaacactatgcctatttcctgcttggagaacaggttttgaggtagagctctcaggggtggggaagaagcctggcagcccacatgctataaatgctgttgtccacctttatgctctaacttggaggcagagacccaagcagctggaggctctgtgtgtgggtgagtttagccacatcccctaggtgttctccagcttgaggatcgcaggcagagaggaccagcccagcagccacaggcctgaccaaggccaggttgggaaggagggcaactccccattttccactgggaggtgtttcacagcatggtcaacatggatgacctacaaagaccctcatgctttgatatcttccttggccagatccatccctaccagggactcagcagggcctaagcagggggagtgggagaacagaccccaagaggaaggaagacctcatcactgactgtgagagggtcatcaccccccgatgatcaccttgaagggtccaggctgtgggccctattcatctcttttcattctcaggtcgctgatttcttggagcctgaaaagaaggtaactgggcatatgagggacagatggagtgagtcagtgagtgagtgacctcatccttcctcctaacagcctgggagggacagggcaggttttctgcagagcatggaagattcagctgaaatcagagaggtgaagccagtttcccagggtaacatagtgaggcactgaaagaaaggagactgcactgagcccaggtccctgggctccccagagctccttactcttcctcctcctcagcagccttgagaccccacaacctccagccggaggcctgaagcatgaggccatgccaggtgccagatgatgcttggaattttcccgggtgcttcgggtcttcccagcactctggtctcgcccgccctgcctctcgctctgcccagcttcctgagtcctgacagagcacagtgggggaagatgttggcagaggtggcagatgggctcacggccatccctccagcaggagcagcgactggacccagagccatgtggctgtgccctctggccctcaacctcatcttgatggcagcctctggtgctgcgtgcgaagtgaaggacgtttgtgttggaagccctggtatccccggcactcctggatcccacggcctgccaggcagggacgggagagatggtgtcaaaggagaccctggccctccaggtactgtgctgcagaccccaccctcagctgagggacacagaccccttttcaggaggcccatctgtccaggcccctaggctgtgggccatagtgagctgggggctatagtaagctgggtgggacttcagtctgcagggctggtgggttcctggggcccttatgatggcgcatcctggagagtctgtcctcatagtgcccacggagtgatagctgagccagccccggtgataatgggcatcgagtctcattagctccaaccagttgtgggtgacagatcctacacatccatgtctcttttctctgcaggccccatgggtccgcctggagaaacaccatgtcctcctgggaataatgggctgcctggagcccctggtgtccctggagagcgtggagagaagggggaggctggcgagagaggccctccaggtgagcagggcgggcaggtgggcagtggaaacatgggcacagcgacctgaagtcagttacacaggggtgatgggggtcagacaaaccctgcaggtaccccaagggcatttggctcaacctaagtaagagaatatgaatttgagggagaaagccgaggtgtctggggagtgtggtcacaattcagagaagggcaggtgtgggaagtcctccgtgcctcatgaccgctgatggggacacactgagtcaggtgtgggacgagggacagctctgggaggcaggggaggcatgtcctgggatggagccctgggggcagtctgaagggtgaatgcggacgaggcatccaggcagatggtgtgatcaggagccccacagacagaggggaactttgaagctcagagcggtaagcaagtccatcagggcagtgcagagagcatcatgcttgcccttggtggagggtgcgggagagggacttgccccacagaggcgggcagacagaacccctcgagggacagagcaggaaagaggacaaggggtgggggtctcagcaggggcaaggcttcactaaagaataggggaccacggggtgtggagacacactggaatctcgtggaccctctgagcctagggtctgggtggtgcctaacagcaatgaaagggcagagttccaggattgcagatggcaaaacgcctgcgtggcagcaagtgggagtcttcactggcctgcccctccttctgtgtggggcactctccacagggcttccagctcatctagatgaggagctccaagccacactccacgacttcagacatcaaatcctgcagacaaggggaggtaaggggaccccctgggcctcacggggtaggagtttcccacaaattcccctcattctcagcaccaccttctagaatagagatgacaaacaagcgtgcacatgcaggtgttggggaaaggaatgatgcttgcttttctgatgtctttgaatggccaagaggagacaagcagacacaattcactccccatttcataagaaagcaagttctctgcctgtcttgctttccactgaatcctaggaaattgcaccatttctggcaataagtaattgttacttagatgaatgaataaatggaggagagtctaaaagtgaatttagaaaactgcaattggaagaggaagagaagacacagagagaggcagagatggagagactggggaggatctggtagcagagaccctaggtgagggaggtggcttagagacaaagtggtcagtggcctgacctggactcctctgctctcagccctcagtctgcagggctccataatgacagtaggagagaaggtcttctccagcaatgggcagtccatcacttttgatgccattcaggaggcatgtgccagagcaggcggccgcattgctgtcccaaggaatccagaggaaaatgaggccattgcaagcttcgtgaagaagtacaacacatatgcctatgtaggcctgactgagggtcccagccctggagacttccgctactcagatgggacccctgtaaactacaccaactggtaccgaggggagcctgcaggtcggggaaaagagcagtgtgtggagatgtacacagatgggcagtggaatgacaggaactgcctgtactcccgactgaccatctgtgatttctgagaggcatttaggccatgggacagggaggatcctgtctggccttcagtttccatccccaggatccacttggtctgtgagatgctagaactccctttcaacagaattcacttgtggctattagagctggaggcacccttagccacttcattcccctgatgggccctgactcttccccataatcactgaccagccttgacactccccttgcaaaccatcccagcactgcaccccaggcagccactcctagccttggcctttggcatgagatggaggcttccttattccccatctggtccagttccttcacttacagatggcagcagtgaggccttggggtagaaggatcctccaaagtcacacagagtgcctgcctcctggtcccctcagctctgcctctgcagcccactgcctgcccagagccatcaggatgagcagtaccggccaagcataatgacagagagaggcagatttcagggaagccctgactgtgtggagctaaggacacagtggagattctctggcactctgaggtctctgtggcaggcctggtcaggctctccaggtggtcagagggcccagtggtgccccagcacggtggtgcccaagccaaccctgtgactgacatgtacgattcactcctttgagtctttggatgccaactcagccccctgacctggaggcagccggccaaggcctctagggaagagccccccactgcagacatgacccgagtaactttctgctgatgaacaaatctgcaccccacttcagacctcggtgggcattcacaccaccccccatgccaccggctccactttccccttttattaatacattcacccagataatcattaaaattaacatgtgccaggtcttaggatgtgtcttggggtgggcacagtacccggtgactcttggggatatttatttattttccctgagcctatatcttcatctgtgaaatggggataaaaatacttgttgctgtcacaattattaccatctctccagctagcaaaattactaccagagccgttactacacacaaaggctattgaccgagcacataccatgtgccacacaccttgacaaaatcttttaatacagtttattatgtactattcaatctttacacaatgtcacgggaccagtattgtttacccaattttttataaggacactgaagcttagaggagtgaaatgttttgagtgttatttcagagagcaaatggcaaagactggatccaaacccatcttcctggacctgaagttcatgctcccagccaccccacccctgagctgaataaagatgatttaagcataataaatcgttagtgtgttcacatgagtttccatagctttggttccaagaaacatcacatttctg

SEQ ID NO: 442 - DNA, 1121 bp, Homo sapiens
  Genbank Accession No. M68864
ggaattccctatagagccgggtgagagagcgagcgcccgtcggcgggtgtcgagggcgggttgcctcgcgctgacccttcccgccctccttctcgtcacacaccaggtccccgcggaagccgcggtgtcggcgccatggcggagctgacggctcttgagagtctcatcgagatgggcttccccaggggacgcgcggagaaggctctggccctcacagggaaccagggcatcgaggctgcgatggactggctgatggagcacgaagacgaccccgatgtggacgagcctttagagactccccttggacatatcctgggacgggagcccacttcctcagagcaaggcggccttgaaggatctgcttctgctgccggagaaggcaaacccgctttgagtgaagaggaaagacaggaacaaactaagaggatgttggagctggtggcccagaagcagcgggagcgtgaagaaagagaggaacgggaggcattggaacgggaacggcagcgcaggagacaagggcaagagttgtcagcagcacgacagcggctacaggaagatgagatgcgccgggctgctgctgaggagaggcggagggaaaatgccgaggagttagcagccagacaaagagttagagaaaagatcgagagggacaaagcagagagagccaagaagtatggtggcagtgtgggctctcagccacccccagtggcaccagagccaggtcctgttccctcttctcccagccaggagcctcccaccaagcgggagtatgaccagtgtcgcatacaggtcaggctgccagatgggacctcactgacccagacgttccgggcccgggaacagctggcagctgtgaggctctatgtggagctccaccgtggggaggaactaggtgggggccaggaccctgtgcaattgctcagtggcttccccagacgggccttctcagaagctgacatggagcggcctctgcaggagctgggactcgtgccttctgctgttctcattgtggccaagaaatgtcccagctgagggcctttgtcccattgtccctctgtgaccccttcatctttgataaagcactgacatctccttcctaataaatagaccctgagttctgt

SEQ ID NO: 443 - DNA, 1581 bp, Homo sapiens
  Genbank Accession No. M73720
ataactaaattacattttcttggtcttttgactatgaaatagtttaccctagcaacatgaaaaacaagagacctaagctattagaagaaatgcagttctatgtatcttgtgtgtatagtttttccctgggtggttttcaacgaccagtgactccttagctggtttcctcagctgctagcacttgctctgggtacttgtcctcaacacgtccatctgcaacaatgtgtgcctaggaaataaactcaacttactactcacccaaccaaaatgtaattttttaaacgcagcacacactgggtggattccaaagtcatgattatgctttactatgcactctgtactattcagaccactactctcattcattactgcaattaactgcacacataactattttttattgctaattatacaccactgatttccactttaaaaaaacattagcatttgtctctaattaaatatttactgcttgtgttttacagacccgatatcaggttcttctttagactgggcttatgacctgggcatcaaacacacatttgcctttgagctccgagataaaggcaaatttggttttctccttccagaatcccggataaagccaacgtgcagagagaccatgctagctgtcaaatttattgccaagtatatcctcaagcatacttcctaaagaactgccctctgtttggaataagccaattaatccttttttgtgcctttcatcagaaagtcaatcttcagttatccccaaatgcagcttctatttcacctgaatccttctcttgctcatttaagtcccatgttactgctgtttgcttttacttactttcagtagcaccataacgaagtagctttaagtgaaaccttttaactacctttctttgctccaagtgaagtttggacccagcagaaagcattattttgaaaggtgatatacagtggggcacagaaaacaaatgaaaaccctcagtttctcacagattttcaccatgtggcttcatcaatttatgtgctaatacaataaaataaaatgcacttaatgctttaaaattcatctttttatgataaacaatattctctgtatttctctatagcattaataatcaatattaatgccattcattcagtctgttaataagaaataatatcttcaattttcaaaaacataatttgcctatctttttctgatagaagtagacattgtttatatcttcaaaaaagcaaaaggatgtcctagcaggaaataaagtggttcatatagagatgaatctcagtcctttaaataaccgatccagttctcatcagcataatgtacattaaattcaaaatagtttaatttaacctgccataatcagaagaaaccacctgctaaaacatctgtttgccggtacagacacagacaagacagtctggtcagctgtgacccctgccctcctaatggatagaaaggaaacctggaaacatactgtaagttgaggacggaaagtcatgttgaccaaaggcaatcagggtaacttgctgcatttgtaccatttatactcctattatttaagatagtattattggatagcttctccc

SEQ ID NO: 444 - DNA, 1071 bp, Homo sapiens
  Genbank Accession No. M84526
gcagttctggtcctcctaggagcggccgcctgcgcggcgcggccccgtggtcggatgctgggcggcagagaggccgaggcgcacgcgcggccctacatggcgtcggtgcagctgaacggcgcgcacctgtgcgcaggcgtcctggtggcggagcggtgggtgctgagcgcggcgcactgcctggaggacgcggccgacgggaaggtgcaggttctcctgggcgcgcactccctgtcgcagccggagccctccaagcgcctgtacgacgtgctccgcgcagtgccccacccggacagccagcccgacaccatcgaccacgacctcctgctgctacagctgtcggagaaggccacactgggccctgctgtgcgccccctgccctggcagcgcgtggaccgcgacgtggcaccgggaactctctgcgacgtggccggctggggcatagtcaaccacgcgggccgccgcccggacagcctgcagcacgtgctcttgccagtgctggaccgcgccacctgcaaccggcgcacgcaccacgacggcgccatcaccgagcgcttgatgtgcgcggagagcaatcgccgggacagctgcaagggtgactccgggggcccgctggtgtgcgggggcgtgctcgagggcgtggtcacctcgggctcgcgcgtttgcggcaaccgcaagaagcccgggatctacacccgcgtggcgagctatgcggcctggatcgacagcgtcctggcctagggtgccggggcctgaaggtcagggtcacccaagcaacaaagtcccgagcaatgaagtcatccactcctgcatctggttggtctttattgagcacctactatatgcagaaggggaggccgaggtgggaggatcattggatctcaggagttggagatcagcatgggccacgtagcgcgactccatctctacaaataaataaaaattagctgggcaattggcgggcatggaggtgggtgcttgtagttccagctactcaggaggctgaggtgggaggatgacttgaacgcaggaggctgaggctgcagtgagttgtgattgcaccactgccct

SEQ ID NO: 445 - DNA, 1599 bp, Homo sapiens
  Genbank Accession No. M87789
tctaaagaagcccctgggagcacagctcatcaccatggactggacctggaggttcctctttgtggtggcagcagctacaggtgtccagtcccagatgcaggtggtgcagtctggggctgaagtaaagaagcctgggtcctcggtgacggtctcctgcaaggcatctggaggcaccttcagcaactatgctatcagctgggtgcgacaggcccctggacaagggcttgagtggatgggagggatcatccctctttttggtacaccaacctactcacagaacttccagggcagagtcacgattaccgcggacaaatccaccagcacagcccacatggagctgatcagcctgagatctgaggacacggccgtgtattactgtgcgacagatcgctacaggcaggcaaattttgaccgggcccgggttggctggttcgacccctggggccagggcaccctggtcaccgtctcctcagcctccaccaagggcccatcggtcttccccctggcaccctcctccaagagcacctctgggggcacagcggccctgggctgcctggtcaaggactacttccccgaaccggtgacggtgtcgtggaactcaggcgccctgaccagcggcgtgcacaccttcccggctgtcctacagtcctcaggactctactccctcagcagcgtggtgaccgtgccctccagcagcttgggcacccagacctacatctgcaacgtgaatcacaagcccagcaacaccaaggtggacaagaaagttgagcccaaatcttgtgacaaaactcacacatgcccaccgtgcccagcacctgaactcctggggggaccgtcagtcttcctcttccccccaaaacccaaggacaccctcatgatctcccggacccctgaggtcacatgcgtggtggtggacgtgagccacgaagaccctgaggtcaagttcaactggtacgtggacggcgtggaggtgcataatgccaagacaaagccgcgggaggagcagtacaacagcacgtaccgtgtggtcagcgtcctcaccgtcctgcaccaggactggctgaatggcaaggagtacaagtgcaaggtctccaacaaagccctcccagcccccatcgagaaaaccatctccaaagccaaagggcagccccgagaaccacaggtgtacaccctgcccccatcccgggatgagctgaccaagaaccaggtcagcctgacctgcctggtcaaaggcttctatcccagcgacatcgccgtggagtgggagagcaatgggcagccggagaacaactacaagaccacgcctcccgtgctggactccgacggctccttcttcctctacagcaagctcaccgtggacaagagcaggtggcagcaggggaacgtcttctcatgctccgtgatgcatgaggctctgcacaaccactacacgcagaagagcctctccctgtctccgggtaaatgagtgcgacggccggcaagcccccgctccccgggctctcgcggtcgcacgaggatgcttggcacgtaccccgtgtacatacttcccgggcgcccagcatggaaataaagcacccagcgctgccctgggcccctgcg

SEQ ID NO: 446 - DNA, 3386 bp, Homo sapiens
  Genbank Accession No. M91029
cgccgaggtatcacctggcaccacccgcaccctcaccccgtgtctccatgccctgcctctgctccccacacccctcacctcaagctgtcccctcacctcacgcttggctgtctcctgatcctcagcctctcccaggtacccctggtcctgctgccctcaccccatccccagactctgtaggagagtgcccgagggcggagggccagccatgctgaccttccttccctccccccaggagctgttcacccgctcactggctgagagcgagctccgtagtgccccgtatgagttccccgaggagagccccattgaacagctggaggagcggcggcagcggctggagcggcagatcagccaggatgtcaagctggagccagacatcctgcttcgggccaagcaagatttcctgaagacggacagtgactcggacctacagctctacaaggaacagggtgaggggcagggtgaccggagcctgcgggagcgtgatgtgctggaacgggagtttcagcgggtcaccatctctggggaggagaagtgtggggtgccgttcacagacctgctggatgcagccaagagtgtggtgcgggcgctcttcatccgggagaagtacatggccctgtccctgcagagcttctgccccaccacccgccgctacctgcagcagctggctgaaaagcctctggagacccggacctatgaacagggccccgacacccctgtgtctgctgatgccccggtgcacccccctgcgctggagcagcacccgtatgagcactgtgagccaagcaccatgcctggggacctgggcttgggtctgcgcatggtgcggggtgtggtgcacgtctacacccgcagggaacccgacgagcattgctcagaggtggagctgccataccctgacctgcaggaatttgtggctgacgtcaatgtgctgatggccctgattatcaatggccccataaagtcattctgctaccgccggctgcagtacctgagctccaagttccagatgcatgtgctactcaatgagatgaaggagctggccgcccagaagaaagtgccacaccgagatttctacaacatccgcaaggtggacacccacatccatgcctcgtcctgcatgaaccagaagcatctgctgcgcttcatcaagcgggcaatgaagcggcacctggaggagatcgtgcacgtggagcagggccgtgaacagacgctgcgggaggtctttgagagcatgaatctcacggcctacgacctgagtgtggacacgctggatgtgcatgcggacaggaacactttccatcgctttgacaagtttaatgccaaatacaaccctattggggagtccgtcctccgagagatcttcatcaagacggacaacagggtatctgggaagtactttgctcacatcatcaaggaggtgatgtcagacctggaggagagcaaataccagaatgcagagctgcggctctccatttacgggcgctcgagggatgagtgggacaagctggcgcgctgggccgtcatgcaccgcgtgcactcccccaacgtgcgctggctggtgcaggtgccccgcctctttgatgtgtaccgtaccaagggccagctggccaacttccaggagatgctggagaacatcttcctgccactgttcgaggccactgtgcaccctgccagccacccggaactgcatctcttcttagagcacgtggatggttttgacagcgtggatgatgagtccaagcctgaaaaccatgtcttcaacctggagagccccctgcctgaggcgtgggtggaggaggacaacccaccctatgcctactacctgtactacacctttgccaacatggccatgttgaaccacctgcgcaggcagaggggcttccacacgtttgtgctgaggccacactgtggggaggctgggcccatccaccacctggtgtcagccttcatgctggctgagaacatttcccacgggctccttctgcgcaaggcccccgtcctgcagtacctgtactacctggcccagatcggcatcgccatgtctccgctcagcaacaacagcctcttcctcagctatcaccggaatccgctaccggagtacctgtcccgcggcctcatggtctccctgtccactgatgatcccttgcagttccacttcaccaaggagccgctgatggaggagtacagcatcgccacccaggtgtggaagctcagctcctgcgatatgtgtgagctggcccgcaacagcgtgctcatgagcggcttctcgcacaaggtaaagagccactggctgggacccaactataccaaggaaggccctgaggggaatgacatccgccggaccaatgtgccagacatccgcgtgggctaccgctacgagaccctgtgccaggagctggcgctcatcacgcaggcagtccagagtgagatgctggagaccattccagaggaggcgggtatcaccatgagcccagggcctcaatgagcctggtccatgaagtgcccaccacatcgcagcacttttaccacgttttgtcctcagaccccgcccatgctgtgtggtctctgcatgtctccattcttctctgtctctgtcttgcatgtctcctaccatgtcactgtccctgggccacccagtgaaagcaaagcctgggaatctgctcattgttgtttgggctcaggtattgagcctgatggcccaggtattgagggcctcccctgctggtggccctgtcctgggatcctcagaagcctgactgtcctatgggcttctccagtgtccacaggggcttgggatggttgtggggggctggcccctctagcctttccggtccttcctgggcaaatctaagccttggccagggcgaagtttaggcccctgtcttgttcatgtagccgaggggcaggcgggggacctctacacctctgctgtgggcacggggctgctgagggtctgtggaactccagcagctctgcactgggtagagctgggcctagagctcagtcacaggcctgggcttcctggcctgagtgggtagacgcaggcggcagaggtgctggaccacatctccgccaagtcactgcccagcagccttctccgtcctgtccccagcccacgtgctccttgggtgtcagcttcctgtgcctctgtgggagaggcagctgccttgtgttatgtctggggccacagttgctgcaaagtcctggatctgccactcaaccccgggagtggtgttcccagtgtggctcccagagctttgaccagattgtgatcccagctggcccctatgttgtgttctggactgaggcctttgctgtgaactgcagtgtttcatacgaaccatctttcctagtgcatgagaaataaagattatttaagt

SEQ ID NO: 447 - DNA, 1746 bp, Homo sapiens
  Genbank Accession No. M92843
gagcctgacttcagcgctcccactctcggccgacacccctcatggccaaccgttacaccatggatctgactgccatctacgagagcctcctgtcgctgagccctgacgtgcccgtgccatccgaccatggagggactgagtccagcccaggctggggctcctcgggaccctggagcctgagcccctccgactccagcccgtctggggtcacctcccgcctgcctggccgctccaccagcctagtggagggccgcagctgtggctgggtgcccccaccccctggcttcgcaccgctggctccccgcctgggccctgagctgtcaccctcacccacttcgcccactgcaacctccaccaccccctcgcgctacaagactgagctatgtcggaccttctcagagagtgggcgctgccgctacggggccaagtgccagtttgcccatggcctgggcgagctgcgccaggccaatcgccaccccaaatacaagacggaactctgtcacaagttctacctccagggccgctgcccctacggctctcgctgccacttcatccacaaccctagcgaagacctggcggccccgggccaccctcctgtgcttcgccagagcatcagcttctccggcctgccctctggccgccggacctcaccaccaccaccaggcctggccggcccttccctgtcctccagctccttctcgccctccagctccccaccaccacctggggaccttccactgtcaccctctgccttctctgctgcccctggcacccccctggctcgaagagaccccaccccagtctgttgcccctcctgccgaagggccactcctatcagcgtctgggggcccttgggtggcctggttcggaccccctctgtacagtccctgggatccgaccctgatgaatatgccagcagcggcagcagcctggggggctctgactctcccgtcttcgaggcgggagtttttgcaccaccccagcccgtggcagccccccggcgactccccatcttcaatcgcatctctgtttctgagtgacaaagtgactgcccggtcagatcagctggatctcagcggggagccacgtctcttgcactgtggtctctgcatggaccccagggctgtggggacttgggggacagtaatcaagtaatccccttttccagaatgcattaacccactcccctgacctcacgctggggcaggtccccaagtgtgcaagctcagtattcatgatggtgggggatggagtgtcttccgaggttcttgggggaaaaaaaattgtagcatatttaagggaggcaatgaaccctctcccccacctcttccctgcccaaatctgtctcctagaatcttatgtgctgtgaataataggccttcactgcccctccagtttttatagacctgaggttccagtgtctcctggtaactggaacctctcctgagggggaatcctggtgctcaaattaccctccaaaagcaagtagccaaagccgttgccaaaccccacccataaatcaatgggccctttatttatgacgactttatttattctaatatgattttatagtatttatatatattgggtcgtctgcttcccttgtatttttcttcctttttttgtaatattgaaaacgacgatataattattataagtagactataatatatttagtaatatatattattaccttaaaagtctatttttgtgttttgggcatttttaaataaacaatctgagtgt

SEQ ID NO: 448 - DNA, 2075 bp, Homo sapiens
  Genbank Accession No. M92934
cccggccgacagccccgagacgacagcccggcgcgtcccggtccccacctccgaccaccgccagcgctccaggccccgcgctccccgctcgccgccaccgcgccctccgctccgcccgcagtgccaaccatgaccgccgccagtatgggccccgtccgcgtcgccttcgtggtcctcctcgccctctgcagccggccggccgtcggccagaactgcagcgggccgtgccggtgcccggacgagccggcgccgcgctgcccggcgggcgtgagcctcgtgctggacggctgcggctgctgccgcgtctgcgccaagcagctgggcgagctgtgcaccgagcgcgacccctgcgacccgcacaagggcctcttctgtgacttcggctccccggccaaccgcaagatcggcgtgtgcaccgccaaagatggtgctccctgcatcttcggtggtacggtgtaccgcagcggagagtccttccagagcagctgcaagtaccagtgcacgtgcctggacggggcggtgggctgcatgcccctgtgcagcatggacgttcgtctgcccagccctgactgccccttcccgaggagggtcaagctgcccgggaaatgctgcgaggagtgggtgtgtgacgagcccaaggaccaaaccgtggttgggcctgccctcgcggcttaccgactggaagacacgtttggcccagacccaactatgattagagccaactgcctggtccagaccacagagtggagcgcctgttccaagacctgtgggatgggcatctccacccgggttaccaatgacaacgcctcctgcaggctagagaagcagagccgcctgtgcatggtcaggccttgcgaagctgacctggaagagaacattaagaagggcaaaaagtgcatccgtactcccaaaatctccaagcctatcaagtttgagctttctggctgcaccagcatgaagacataccgagctaaattctgtggagtatgtaccgacggccgatgctgcaccccccacagaaccaccaccctgccggtggagttcaagtgccctgacggcgaggtcatgaagaagaacatgatgttcatcaagacctgtgcctgccattacaactgtcccggagacaatgacatctttgaatcgctgtactacaggaagatgtacggagacatggcatgaagccagagagtgagagacattaactcattagactggaacttgaactgattcacatctcatttttccgtaaaaatgatttcagtagcacaagttatttaaatctgtttttctaactgggggaaaagattcccacccaattcaaaacattgtgccatgtcaaacaaatagtctatcttccccagacactggtttgaagaatgttaagacttgacagtggaactacattagtacacagcaccagaatgtatattaaggtgtggctttaggagcagtgggagggtaccggcccggttagtatcatcagatcgactcttatacgagtaatatgcctgctatttgaagtgtaattgagaaggaaaattttagcgtgctcactgacctgcctgtagccccagtgacagctaggatgtgcattctccagccatcaagagactgagtcaagttgttccttaagtcagaacagcagactcagctctgacattctgattcgaatgacactgttcaggaatcggaatcctgtcgattagactggacagcttgtggcaagtgaatttgcctgtaacaagccagattttttaaaatttatattgtaaatattgtgtgtgtgtgtgtgtgtgtatatatatatatatatgtacagttatctaagttaatttaaagttgtttgtgcctttttatttttgtttttaatgctttgatatttcaatgttagcctcaatttctgaacaccataggtagaatgtaaagcttgtctgatcgttcaaagcatgaaatggatacttatatggaaattctgctcagatagaatgacagtccgtcaaaacagattgtttgcaaaggggaggcatcagtgtcttggcaggctgatttctaggtaggaaatgtggtagctcacg

SEQ ID NO: 449 - DNA, 1080 bp, Homo sapiens
  Genbank Accession No. M94880
cgaaccctcctcctgctactctcgggggccctggccctgacccagacctgggcaggctcccactccatgaggtatttcttcacatccgtgtcccggcccggccgcggggagccccgcttcatcgcagtgggctacgtggacgactcgcagttcgtgcagttcgacagcgacgccgcgagccagaggatggagccgcgggcgccgtggatagagcaggaggagccggagtattgggacgaggagacacggaatgtgaaggcccactcacagactaaccgagcgaacctggggaccctgcgcggctactacaaccagagcgaggacggttctcacaccatccagataatgtatggctgcgacgtggggtcggacgggcgcttcctccgcgggtaccggcaggacgcctacgacggcaaggattacatcgccctgaacgaggacctgcgctcttggaccgcggcggacatggcggctcagatcaccaagcgcaagtgggaggcggcccgtcgggcggagcagctgagagcctacctggagggcgagtgcgtggacgggctccgcagatacctggagaacgggaaggagacgctgcagcgcacggacccccccaagacacatatgacccaccaccccatctctgaccatgaggccactctgaggtgctgggccctgagcttctaccctgcggagatcacactgacctggcagcgggatggggaggaccagacccaggacacggagctcgtggagaccaggcctgcaggggatggaaccttccagaagtgggcggctgtggtggtaccttctggaaaggagaagagatacacctgccatgtgcagcatgagggtctgcccgagcccctcaccctgagatgggagccatcttcccagcccaccatccccattgtgggcatcattgctggcctggttctccttggagctgtgatcgctggagctgtggtcgctgccgtgatgtggaggaagaagagctcagttagaaaaggagggagctactctcaggctgcaagcagtgacagtgcccagggctctgatgtgtctctcacagcttgtaaagtgtga

SEQ ID NO: 450 - DNA, 309 bp, Homo sapiens
  Genbank Accession No. M98539
gggtagactgcagtcctccatcctagctttcggtcacacccctcaggactccccagggctgaagctgggatcccggccagccaggtgacccccacgctctggatgtctctgctctgttccttccccgagcccctgccccggctccccgccaaagcacccctgcccactcgggcttcatcctgcacaataaactccggaagcaagtcagtctggctcctggctgtctgcgctgtcatcacccgtcctgggcctggcctggccacccggacctccccctctaaaatctcagcctgacgtcaacaaaggaac

SEQ ID NO: 451 - DNA, 2653 bp, Homo sapiens
  Genbank Accession No. M99487
ctcaaaaggggccggatttccttctcctggaggcagatgttgcctctctctctcgctcggattggttcagtgcactctagaaacactgctgtggtggagaaactggaccccaggtctggagcgaattccagcctgcagggctgataagcgaggcattagtgagattgagagagactttaccccgccgtggtggttggagggcgcgcagtagagcagcagcacaggcgcgggtcccgggaggccggctctgctcgcgccgagatgtggaatctccttcacgaaaccgactcggctgtggccaccgcgcgccgcccgcgctggctgtgcgctggggcgctggtgctggcgggtggcttctttctcctcggcttcctcttcgggtggtttataaaatcctccaatgaagctactaacattactccaaagcataatatgaaagcatttttggatgaattgaaagctgagaacatcaagaagttcttatataattttacacagataccacatttagcaggaacagaacaaaactttcagcttgcaaagcaaattcaatcccagtggaaagaatttggcctggattctgttgagctagcacattatgatgtcctgttgtcctacccaaataagactcatcccaactacatctcaataattaatgaagatggaaatgagattttcaacacatcattatttgaaccacctcctccaggatatgaaaatgtttcggatattgtaccacctttcagtgctttctctcctcaaggaatgccagagggcgatctagtgtatgttaactatgcacgaactgaagacttctttaaattggaacgggacatgaaaatcaattgctctgggaaaattgtaattgccagatatgggaaagttttcagaggaaataaggttaaaaatgcccagctggcaggggccaaaggagtcattctctactccgaccctgctgactactttgctcctggggtgaagtcctatccagatggttggaatcttcctggaggtggtgtccagcgtggaaatatcctaaatctgaatggtgcaggagaccctctcacaccaggttacccagcaaatgaatatgcttataggcgtggaattgcagaggctgttggtcttccaagtattcctgttcatccaattggatactatgatgcacagaagctcctagaaaaaatgggtggctcagcaccaccagatagcagctggagaggaagtctcaaagtgccctacaatgttggacctggctttactggaaacttttctacacaaaaagtcaagatgcacatccactctaccaatgaagtgacaagaatttacaatgtgataggtactctcagaggagcagtggaaccagacagatatgtcattctgggaggtcaccgggactcatgggtgtttggtggtattgaccctcagagtggagcagctgttgttcatgaaattgtgaggagctttggaacactgaaaaaggaagggtggagacctagaagaacaattttgtttgcaagctgggatgcagaagaatttggtcttcttggttctactgagtgggcagaggagaattcaagactccttcaagagcgtggcgtggcttatattaatgctgactcatctatagaaggaaactacactctgagagttgattgtacaccgctgatgtacagcttggtacacaacctaacaaaagagctgaaaagccctgatgaaggctttgaaggcaaatctctttatgaaagttggactaaaaaaagtccttccccagagttcagtggcatgcccaggataagcaaattgggatctggaaatgattttgaggtgttcttccaacgacttggaattgcttcaggcagagcacggtatactaaaaattgggaaacaaacaaattcagcggctatccactgtatcacagtgtctatgaaacatatgagttggtggaaaagttttatgatccaatgtttaaatatcacctcactgtggcccaggttcgaggagggatggtgtttgagctagccaattccatagtgctcccttttgattgtcgagattatgctgtagttttaagaaagtatgctgacaaaatctacagtatttctatgaaacatccacaggaaatgaagacatacagtgtatcatttgattcacttttttctgcagtaaagaattttacagaaattgcttccaagttcagtgagagactccaggactttgacaaaagcaacccaatagtattaagaatgatgaatgatcaactcatgtttctggaaagagcatttattgatccattagggttaccagacaggcctttttataggcatgtcatctatgctccaagcagccacaacaagtatgcaggggagtcattcccaggaatttatgatgctctgtttgatattgaaagcaaagtggacccttccaaggcctggggagaagtgaagagacagatttatgttgcagccttcacagtgcaggcagctgcagagactttgagtgaagtagcctaagaggattctttagagaatccgtattgaatttgtgtggtatgtcactcagaaagaatcgtaatgggtatattgataaattttaaaattggtatatttgaaataaagttgaatattatatataaaaaaaaaaaaaaaaaaa

SEQ ID NO: 452 - DNA, 301 bp, Homo sapiens
  Genbank Accession No. N22006
ttttgaattcataatcatttattgtaaatcactcacagtttacacattaccagtggcaaaataacactgttaaacacctactggatgaagaacttcattgtgactatttccaattgccatcatatctttttctaaaatttaaaatttaacttttaaatcctacatcttttctgaaaatatctatcttcaaagtgctccaatactaacactataagccctttcttttgctctaacatctaacacaaagggcacactgtcccattaattccacatgcactttacaaagcaacttcacacacaa

SEQ ID NO: 453 - DNA, 450 bp, Homo sapiens
  Genbank Accession No. N22620
  unsure (1)..(450): n = a or c or g or t
tttcaagtcacagattacatatatttacattaattcaaatgtccaaagcacagtacagtagggtctatttaatagttcacataatttaagatttacatatacacaagcacatgaaccaatattagtttgctagaacagggatttaagaagttactcagacattttggtattgacacttacatatttatggcaacaaattatgatgactttaaattttcaatgagatcttttgtacaagaatacagaatgggaagaatgtacaaaatgaaaagacaggcaaacaaatgtactttccttggcactatttctataacaccatatagggttgtgggcctcggtgccgaaattccctggcaagccccggggggttcccacctaagttctnaggagccgggccgccacccgngttggaagctcccagctttttggttcccctttaggtgagggtta

SEQ ID NO: 454 - DNA, 368 bp, Homo sapiens
  Genbank Accession No. N23352
  unsure (1)..(368): n = a or c or g or t
nttgcacttggggtaataggtttattatctctatatacaagtaagcatttattgatgtttgtcaaaaataagagacaagataacaaaaactattttagcatgaaaacgagatagctgcaatagactaatactgagcttaaagactccaaaaagagcacagaacctgaaatgacagttttcaggttgtatagttatccagacaatgaagtcaactatacaaggcaagcaacacatgacaataaaacaccatcaacagtttcccactggaggatggagggaggcttgctggggcctgggnaactangtgggaaaaatatttaaaatctcataaatcctccgtatcctttttttccnatttcagggaactt

SEQ ID NO: 455 - DNA, 375 bp, Homo sapiens
  Genbank Accession No. N23730
  unsure (1)..(375): n = a or c or g or t
tcgcattcaacttaaatgnttaacatngacaatgtcttggaacaataagcaaacaatgcttaaatttttcattcaaattcactttccacatgtcaaaagacctcaaggtagaaaaaaataaaataaaaatataaatatctgagaatccatcttaataaataaattaaaaacncnnnccaacgttttcacnnccccntgttaatgtcagaacattcagaccacctcaacaatgcatgatcagtaacattacaatgaacattgatgttgaagaaaaactacagtacatggatatagctatttatttctatctaccagaaaataaagtcgtatcttttcttagtataatattggtcatttctaatcagaacacactat

SEQ ID NO: 456 - DNA, 469 bp, Homo sapiens
  Genbank Accession No. N24761
  unsure (1)..(469): n = a or c or g or t
anaattcaaacttttatttggcaataagttcagagtcacataacacataaaatcaacatttaaaataaatagcaaattcacatctagaataaataggtctgcctaatttgcattaattgtgcctgatatcatacaggcacaatctgtcattccacgagataactggaaaagtctccaaagtcagagttcaaacctgcaggactgaaaacacacagaagcactgtcgcaggttgggttccccgaaagcagatactgaggtggagaatggcgtgcaggaaggttcataggacagtgctgtgggctgagccggctgggtacaggcttgtcagggagaggcactgggctgtaatgtggccacaatgaggtctcactggaccccacaaggggctctggagctgggatggccccagaggttttcccaagttggggtgaggaggccagacctttgtaccccatatggagccggtaa

SEQ ID NO: 457 - DNA, 454 bp, Homo sapiens
  Genbank Accession No. N24899
gttgttggaaaaacatttattgcaattcagtgtcaaaagttttttacaaaaatatgccaccgtctggtacaaacaactataaaaaatcagttcatcatgcaagaaaagtgtgcaaataatttatacagaaggactcagctcacacaatattaaataaacatctctgcatgtaattggtctaactttatgctttagttacaatgttcaaccccctctaatacttttcatttaaaaaagtacattaaagcttctaagcttaggacacaggctgtaatatacgcccactttagccatggtgattggcacttggtagaataaagattggcaccaaggattcccaagtatagaatacagcttggagccttctgcttaacagacttgtgcttcgttaattaaacaaacacatctatactcaaagacagaaaaagtcatgtttaaactccagaaataatgt

SEQ ID NO: 458 - DNA, 441 bp, Homo sapiens
  Genbank Accession No. N24902
  unsure (1)..(441): n = a or c or g or t
ggtcnacagccgtttttctagttccaagttttaaatacatggaaggaagtccgggagaaccatatgaaggagcaggaggagaggaagaaactttttttccttcttttccaggagtagctggaaattaagatcgggttccttttctgccagcttggaagggcaaccccatgactgattgcgattctgaggatgtctatgcaaagttggattcttgttacagtgtatccaatctgaagtattgcacatctgaactgggactgttaacactgatgccaatacagtgtggggtgccagaaagtgtctgctgatatttgtggaaaaaaaatctattttgtttacctactgtatcaaaggggagtctgggggagaatggtagtattttttttttttatcagctgtgaaaaaaatgttacagatctgcacattttcgtgtgtactatg

SEQ ID NO: 459 - DNA, 466 bp, Homo sapiens
  Genbank Accession No. N26713
  unsure (1)..(466): n = a or c or g or t
tgattattccagaatattttattttcccaaagaaggttaaggatagaattttgtagagtttttgtttttttaatgcatccaacacataggagaattttattttaaagccctttttaaaaatgaaaattctagttggtcatcaattctcttcagagcaaacatcatttattctactctataaaaagaaacctaaacaaattaagatgacaagtaagaaaaacttattctctttatctcctttaaaaccaaaattttagttctgctgggctggttttcttcaaattctcattattttaccaatgaggcactttataatacaaatgcttaaagtgttgagggattctgactcccaaaaacatcatttggatataacaagatttgtactactgacgttggatatacacaattaaatcnttcctcctagtggatgatggaaaatnaatggttggangtaanaccggatcca

SEQ ID NO: 460 - DNA, 221 bp, Homo sapiens
  Genbank Accession No. N26801
  unsure (1)..(221): n = a or c or g or t
tttttttttcttgatgcaaatgtttttatttgccacttaaactacagtttccctgtgctatccngatggtgtgggggtgtggaacaggctgctggaaccatggtttacagtagtagcaggtagatgattagtagcatgagtggtgaaatgctgcatctaagtgcctgtcactttgctcccaggggaatatcatgcagcccaggaatagtgttagactggga

SEQ ID NO: 461 - DNA, 445 bp, Homo sapiens
  Genbank Accession No. N26904
  unsure (1)..(445): n = a or c or g or t
aagttttttaaaatttattatttattatttctttttgctcttgtttcgtttctcttccttgagcttctttttggagactttgggtctattggcctttctgtataggtgatacccaatgaggcccaggaggntcggcaccatggccatccctaccagaggcaaaatgcccttcaccagctttanccagtagttggctcggattagtgcaatcagctccacgtcatactgcaccactgcatccgctgggacagatggtggaaatccccgttttccataggccaagtgagaaggaatgattgcccttcgcttctctcccacacacatgtcgagaagactctgctccagacctggaatcacctgcttttggccaagttctataaccagagggtctctggtccagggaggtgtcaataatacgtccatctaccaagcttcccgtgtagtg

SEQ ID NO: 462 - DNA, 438 bp, Homo sapiens
  Genbank Accession No. N29568
ctttatcggtatttgtttgtttctgttccttatcttttccattctctgtcttctgctcttctagatacctctttgtataggctgctcctcctgaagcagcactctcctccttctgagatgagccatatgtggagccagtggatggtggactcttacccacagggctctttttggatggactcagggacccagaaccatggtcgaactgaccttggtgtgtcccagactgatacccggcaccactcggcagagttgagcccatctgggatgtgctggaaagtggaggactaggttttggcacggggctaggacggggtgaccgccgcctcaccaccacagactgggagggggcttttgagagctgggcttcgctcccgaggactcagctcagaaactgctgaggcccgtgatgcagaaccagtgccgtaggtggcatca

SEQ ID NO: 463 - DNA, 497 bp, Homo sapiens
  Genbank Accession No. N30198
tatttttcatgaaatgatttattacttttagaaaacagtataaacttacaaactataaattaagatataagtatatttctgccaaagtaagtcaagaaaaatgcacttcagaatcagcttttattacaggcaatgtattgtaaactcgaacatccagaatctgagttacacttattatttttaacattttactcaataaaaatctgatatactgggtccaagtgatgacacattccaaattaatgtaactttcttgcagcttaaataaacaaatttagatcaccaagtgaaatcaaagccaagtgtatttgcacaactcaagaatgatgtgaatggattagaatctctcatagtgcatacttcgccatttatacacaaactttgagagtcttctgagtgacatggtatttaactttgtttccaagggccaaatactaaaatgtatagaatatcctactctatactcactattaaatgtcatggactagggaaatctg

SEQ ID NO: 464 - DNA, 585 bp, Homo sapiens
  Genbank Accession No. N30856
  unsure (1)..(585): n = a or c or g or t
gattaaaaagagaaaatatactgtaaaatatttatttaataaaaataattttataatctatacagaattgaataaaaagtacaacaaattattttcacttatttacaaaactgcatacagtacaacttgcacattgagttcagcattctataaatatggccacataccaagatgtgaacatattcttgtcttatataagaaaaggctcaggttgtatgccacaaactttgaattaaattccagggaaatattgctttggtaacatgaacaatttgtaccacattccattaaaaaaagatttaataaaatccctcaaacagcacttttctacttgtttcggagtacacaattcccaaattagcacaaacaaaacaaagcaaaaaaagaaaaacagacagaatgtaaaatgnaggttgctacttttatgatatcacttccctttcccttccttagctagtggtcctttcccttcccctaatagtaagggtgggngaatggaaatggcctattcctatccccatccatttgcctccaggatccctgcttaaccnaatgnggtatggtcgncttggccacctgncaccc

SEQ ID NO: 465 - DNA, 579 bp, Homo sapiens
  Genbank Accession No. N32748
  unsure (1)..(579): n = a or c or g or t
cagcagaagagtgacctgattttattcaccttttattggaaatctgtgggacagaactaggcaatgagggtgctacaataataaaggtgagtgttggcagtggcttgaccagagcagaagtgggaatgaaacagttggattctgtttgttttcaaagaagagctcatagaacttactgatggnttgttatgtaggatgtgaaagaaaaccacagaaatgactccaactaaaacagtaaaatgccattcactaatttcaagatgatgagagaagctgttttgcagagataatgaaagaaattctgtttgaagcctattaaagtttgaagtgcatattaattggactttcaagttgagatgtcaagtaagtagcagggtctctgagtatggaatacnaggctgtgggcnagtgacttancgtctgcaacatccacatataggcagcatcnccatagcaacaaacatccngttccaaataatccgccngattttcntcctccacgtccatcttcctcagagtccatcaggggccnccagnactggcnaatccacncatgngcccgttacctccttctcngca

SEQ ID NO: 466 - DNA, 355 bp, Homo sapiens
  Genbank Accession No. N33927
  unsure (1)..(355): n = a or c or g or t
acaattctccgcagattttattaattataactttttttttcagacgtcctgccatcttctcattcagacttttcttagcaaaggtagtccatggcaagtaatgaattcccagtaactaggtctgtaacagaagtaaattctgtttttatgtttataaactcaaaaagtaacatgaagtgcaaacacctttagttccttcccctcggtaaccttcttttgatgaaccagtgtgcagcaaaccaggatgaagttggatttgggtgggatccacacaggtcattttcaggcaagatgagacttcccaagttccatgnatagattcatattatcagttattttatgcattcatttctcc

SEQ ID NO: 467 - DNA, 455 bp, Homo sapiens
  Genbank Accession No. N34817
  unsure (1)..(455): n = a or c or g or t
aacagggatttatagcagctttattcaaaataactaaaatttggaagcaaccaagatgcccttcagtaagtgaatggataaactatggtacacacaatagaacataattcagcactaaaaagaaatgggctatcttgtcctcaaaagatgaggaaacttaaaagcatattactaagtaaaagaaggcagtctgaaaaggctacttactatataactgcaactatgtaacatgcgaaatgatggagatggtttgcagggttaaggggatgatatgtaataaacaggaagagcagggatgacttttagaacaaagtgttctgtgaggtactataaggctgggatacatgtcattatacatttactccaaacccataagcatgtaaaaccnccaagagttaacccctaatggtaaacctatgggcccttgggaccacctatggatggcnccaatggta

SEQ ID NO: 468 - DNA, 412 bp, Homo sapiens
  Genbank Accession No. N36001
  unsure (1)..(412): n = a or c or g or t
attagtgaattagtttatttaaaaccatcagtttttccaatgtgaatggactggttcatatcacaccatatttagagatacaaggtgattataactaacgtgtctacaagacatactgggtcaaacaatgtgatcaatccaaagggtatctttttaaaaagaatttaagtactcagctgcaaagataagttcactaatgagattttcttttttttttttttaaaaaaaaaaggtttttaatgagtcaaatttattacaaaaacttagtgtgtaatcaaagccaaatacattcctcaggcatgccagcggaacgcaaaataatgttaatagaatgttattaaaaaataaaactttttctgaatgatatatataanacctcatggcacattatcctcatttggacaacnggaaa

SEQ ID NO: 469 - DNA, 430 bp, Homo sapiens
  Genbank Accession No. N39415
cagagaataacatttattttatttggaaagttttcctaaatatgagactatctgctatttctcagactaagtgaaaaatttaataaaatagctgccttgataggaggaaaacaaagttcttactttataaggaataacgtatgaatcataaaagaagaatgagcgatcatgggaaacatttagcttttcaaagtttttggaacatgtaccttaaatgcttttgggatccagtaaaggccaggaaaggcaaagagttgaaagtttcttggatttatcctcgtacttacatcattagtaataggaataatgcatctcaaatttggggcatttatataaaaacatgatttttaaatggtagtctagtataaactaggattttgtaatgctgtttaaatattttcatattactttgtttcgaacgtagacattc

SEQ ID NO: 470 - DNA, 443 bp, Homo sapiens
  Genbank Accession No. N40141
gctgactcaagttcttcagttcacgatcttctagttgcagcgatgagtgcacgagtgagatcaagatccagaggaagaggagatggtcaggaggctcccgatgtggttgcattcgtggctcccggtgaatctcagcaagaggaaccaccaactgacaatcaggatattgaacctggacaagagagagaaggaacacctccgatcgaagaacgtaaagtagaaggtgattgccaggaaatggatctggaaaagactcggagtgagcgtggagatggctctgatgtaaaagagaagactccacctaatcctaagcatgctaagactaaagaagcaggagatgggcagccataagttaaaaagaagacaagctgaagctacacacatggctgatgtcacattgaaaatgtgacttgaaaattttgaaaattctctccaataaagtt

SEQ ID NO: 471 - DNA, 513 bp, Homo sapiens
  Genbank Accession No. N47686
  unsure (1)..(513): n = a or c or g or t
gggtttatggggtttaatttttaatactgttaacatcatcgagccagctaaacaccaagaatatcaataaatactaatagtttgttttcacttcctccttctgttggagcactttgactttatatacattccagtcttagtgccaaggccccattgggtttcaaattccataccagagcacatcacctggatgtgactctcatatgctcaaggatattcctggagttgaaaggaaatacaaaatgagcataagaacagattacagacgcgtcagtatgaaagttgatactcgtgaaaaacagcagtttgctgagaccctggaagttagctggagcagtcaggcagaaatgactcgtgaccatggctgcaaatggggcttgttctcacaaagggctttccaccattcttttcttgggcttgcaggtagaagatgcggttttcttcaggataagtaactttactgaggggcatcttgtagatgttggaattttttgtggtcatgatgaggaacnt

SEQ ID NO: 472 - DNA, 442 bp, Homo sapiens
  Genbank Accession No. N48056
atataatattcaactttatttcaaatataccaattttaaaatttatcaatatacccattacgattctttctgagtgacataccacacaaattcaatacggattctctaaagaatcctcttaggctacttcactcaaagtctctgcagctgcctgcactgtgaaggctgcaacataaatctgtctcttcacttctccccaggccttggaagggtccactttgctttcaatatcaaacagagcatcataaattcctgggaatgactcccctgcatacttgttgtggctgcttggagcatagatgacatgcctataaaaaggcctgtctggtaaccctaatggatcaataaatgctctttccagaaacatgagttgatcattcatcattcttaatactattgggttgcttttggtcaaagtcctggagtctctcactgaacttgg

SEQ ID NO: 473 - DNA, 475 bp, Homo sapiens
  Genbank Accession No. N49899
ttccaacaacatttggtttataaaggaatacaaacaggcacaaaacatggttcagaagatttattaagtaaacttgctaaaatatggacagatacacttagcagtcaaacagttgaatattaattgctacctcattaaagtttttgtatctgtattaccaggtccaaacataaaaaccacctctgttcaaaaaataaatgttcagagagctgtatgttctttgttcttgtatgtacattttaaaaaaacacctctttccagtcttgctaaccaagaatattagtcatataaaagaacttagaatttttttccccaagtacaagctatcttttggctccaaaacagttctgaaggttttatttatattttatcttatcccgagggaccaacagcagggcatacctttggccaggccttcttggcagaaagacacagagccgtaaagggaaaaaataaaattgccataaaggtatag

SEQ ID NO: 474 - DNA, 474 bp, Homo sapiens
  Genbank Accession No. N51529
  unsure (1)..(474): n = a or c or g or t
gcaaaaaataaatataaaatttattaaaacacccacaatattttaaagataccaggagtaatacagttcacaaacccagttgtttgtgtaaattataataaaatacaaatcaaaaaggatacatacttgcaatttctaggcaccctaaattaaatttactgaaacactgagggagaagggagggtaaggaggggtagctcaggaggcaaaccaataaagtggaaggaaaaaatattaacaaaaaggtaaaaattatacaaaataaaattatcagcgtaaatttactgtactaagaatatctacagtttaatacacatcctattgcccttgagacatttgcaaaaatctaccattcatccatcaaccccagattaaacttcattttcaagtagccccagttttaccaagtcnagacnggaatatttccagtatgggttgttaagttcacctccantgggaggcccagttacccaa

SEQ ID NO: 475 - DNA, 507 bp, Homo sapiens
  Genbank Accession No. N52254
  unsure (1)..(507): n = a or c or g or t
tttctattaatctttatttatatgatggttctctggaaagcacttcattttaaaacctgtttctgagataagtagcataaggcgcatttgaagaaatactattgttgtatcacagagaacttccatgccttgaaatcatttttttcagagtattattaataagatggtctagctatgcagagcaaaaaagaaaaaaaatcttcaaaagccaagactgtcaggcacatgaaggtatgcataaactgtcttcacatttaattttgtatgattcgggagatacctccatgtacatctaaccaggtcaggcagcataagtcctcagtaaccctggggtgtgccggcttcaagccaaagtattctgttgagtttggtttgtggagagacatttgaaatgttgcttcatagcttccattttctggagaagtggaagaaatgaagcgtnaaaaggcctaggaaatcctcgtcttctccaggctcttcttctccttctgcagnttcctcctcctc

SEQ ID NO: 476 - DNA, 166 bp, Homo sapiens
  Genbank Accession No. N53359
catctaaaagtggttttttaatatatatattttttccaaaggaagaaatttcttgcttttactcagggaaaaaaaaaaaattaaggtacatttgagtagaatgatttcatctaaaagagttctttcaggagacatctgtgattcactgcattgtttttattttctt

SEQ ID NO: 477 - DNA, 380 bp, Homo sapiens
  Genbank Accession No. N53447
gtatagagtaaaatttattatagggttgtagaattcatacaacctaaactccttacagcattcagcacctacacaattttgtgcattccaaatacagatagtagtgagaaagaatcactgcattagttaaaaatgactgtctcatgaaaattcgttcacatataagtcaggttaattacagagcacctaacagaactgcaaagatgtaatttctaaattcaagaaagttgtacaaaatgaaaaacaaaagaaaccaacaatgttgagatctgatatattttacacaaaaagttcaaaaacaatttaaaatatttcaaattttaaaattgctccaccataagatgaataaagagcttacttaaaggaaaagaaaaaaggaa

SEQ ID NO: 478 - DNA, 400 bp, Homo sapiens
  Genbank Accession No. N55502
ctgtgaataaaacttttaataatgtacagcagaaattggacaggctcattcttatattaaaacaaaagatttcctatattacaatttatttacatttgcatactgaagaggtaaagtgtctaagtggctattttacagtcctttctaataaaatgtacaaaaacaaacagaagtaccgagaatgccgttcgggggcctttatggcgacgtaagaacgggcttggacttggtctgtgaatccagaatccagaggtgcaggtagcactactggatcagggttagcctcggggggccaaaaacacggcttcagtttctccccaactctcacttagtgttaagagtggcagaggtgggtgtgggagcttcccaaagacctgctccatcttccccagaggtggaa

SEQ ID NO: 479 - DNA, 430 bp, Homo sapiens
  Genbank Accession No. N57577
ttccctcaggtggttaaaggccaccaaacaaatactgggcaacaggggtttgttgggagagttagaaataaaaaattaaccaaattttgtccctgtgttaattcaatgccagcaaggaggcaagtactgaagaagaaaagggacaattttcatactaaaaaagaattcctctaatcatgtcaccatctcatataatgaatccagggaatcccagaaatagaaaattagtttcaggggacccctgaggcactttaaagccttttaaaaaattacagtaataataaattagatattgctcttcagaggctaacagagcagcagaagcatcaagatcaggtccaaagagttatgcccacatttacaggcttcctggagctgctcagccctcttttaaagcttagttgaatcctttaaaataccctttaaaaag

SEQ ID NO: 480 - DNA, 369 bp, Homo sapiens
  Genbank Accession No. N58172
cctgaccgtactcctcaaaatccagattgtttgtgcatacatttaaaaaaaaaatcaatggaaatttccacctttgttcgaacacataaagtatgccatgagcaatataacatcacaaacgtactgtgacaaaccattaataaagaaggattactaagccaggtgtggtggtgcatgcctgtagcccagctatgcaggaggctgaggcaggaggatcacttgagcccgggagtttgagtccaccctgggtaacacaccaaggactccatctctaaaaaattaaaattaaaaggattactgaaagatctcatttctaaaaaaagaaaaaagaaaaagatcactggaagtccagacatgatatttttaatt

SEQ ID NO: 481 - DNA, 445 bp, Homo sapiens
  Genbank Accession No. N59532
ggcaagtaagaaggaagtttaatttttttttcaggattcagtggagtccattaatgcataccaggggcaaagatcagcccagggtaaggcaagtctgggaggaagcccaccctgccctacagcagccctggaactcagaataggtggtgagtctgccatggtttgctactgggcagcacactagaccaacttgggaatgtggaagagtgagtctatgttccctcagccatccccaagtttacacacaggcatagcagccctactgtgagtcagcaatcattcctgacttgcagtaaggacaatttgcatttacggaaagcaaactggagggggtagcctaagtccgcactgcccatgttattaccctttgcaatgtgaaaaaccatggtgaggtaggttgggcaggttttatcctctccacaaaggtgagcctttgctccacagc

SEQ ID NO: 482 - DNA, 473 bp, Homo sapiens
  Genbank Accession No. N59831
  unsure (1)..(473): n = a or c or g or t
acctataaatatattttattcatacttttaaatattttacaattcaaataaaaaccttatatgtagacaatctgggctaaatttccatgtatgttttgaaaaataatgttagcatgaatagattcatatttaaatatgattttaaatactcttaatagaggagacataagaaatatttacataaaagctaagtagcatgatacagctcatggttattttcctcataggaaaacaattacttgattttttttttttgcataggattaagactgagtatcttttctacattcttttaactttctaaggggcacttctcaaaacacagaccaggtagcaaatctccactggcnctaaggntctcaccaccacttttctcacaccnaagcaataggtaggnatccaggncccaccttctgagggnccggaaggaatgggttccggaaaataatggnttttaaaanattaccattaag

SEQ ID NO: 483 - DNA, 441 bp, Homo sapiens
  Genbank Accession No. N59866
gttttttttttttttttaatacaaaatttattttatttctatgtactaacaatgaacaatgggaggtatttacaattacagtcaaaaccataaaacacttagaattttacaaacttcaagacctacacactgaaaactataaaacatttccgagaagtcaaagactaaataaatggaagatgatactatgttcatcaattagagtacttaatatgttattaattctcactaaattgatttatagattccatacaatcctgctcaaaatcccagcaggctttattctggggaaatattgacaacctaattccaaatgttatagggaaatgcaaaggacctagaacagccaaaacaacttgataaaaggacaaaattgaaatccttaaatttgactcccatatttccaacaaatctacagtaattaagacaatggatataggg

SEQ ID NO: 484 - DNA, 419 bp, Homo sapiens
  Genbank Accession No. N63047
  unsure (1)..(419): n = a or c or g or t
nttattttaaataaatattttaattctattgttgacatttacaagtagaaagcatacagtatgttacaaatatcaaaatgagaaaaatatgaatgttacataagtaacaaatataaaaaaagtattttcttaccttccctgaaagtaagaaaactattcagcataggaaaatatcagtatcaaaaacacagcttaggtgtaaaaaaagtttttacacagtatttaaaaaaaatgatctacaaaatgacaaagtaagtgttgaaatctgatttcatataaattataaaaactgggtacttagagtaaatgttatctggttggaaaataagtccaatcataagctttccttaggtcaattctttaaaatattaaaagcataccgaaaaattttccaataaataaccttnaagaggggttcc

SEQ ID NO: 485 - DNA, 189 bp, Homo sapiens
  Genbank Accession No. N63536
  unsure (1)..(189): n = a or c or g or t
nagcaagcaaaaaactacctttatatatgatgttattcaaatacatggataagataacacattttatgatgtaaaaagtaatatttaaaaattaaaaggcaagtctttctggtattcagaagtctgaagcaaccactgtccagctctttaaaaagagcacattccattctggtggcacacaaatgtaca

SEQ ID NO: 486 - DNA, 523 bp, Homo sapiens
  Genbank Accession No. N64683
  unsure (1)..(523): n = a or c or g or t
acaacttttttaatatatatttttataaacaggtcacgtgataaaatagcacaagaaacacttaccaaatataaggttatatcttccgcatatacaggagaatgaggtcgttatgtacaataagaaaatgattttaggggttggttggttttgttttcctctctccccttaatttttcctcctacagtcgttggaaatatcacagcttcagttgcattaatactttgggcaaatggacagctgcccctccccactaggggtctgtggggaggaggggctggagaaactggctcctgaccactcagccctggagcttcctggggctggcactccagggacaggaaaatctttgggctgttgatctgtttctgattcaacagcatctctctctctctttnccctctctctcncagtctcattctctctctcactctctggctctctgggaaacgggtactctcttccaaccagatagggagtgtcccaagattgggtgtggggcgcggtatctcctggggncttt

SEQ ID NO: 487 - DNA, 401 bp, Homo sapiens
  Genbank Accession No. N66802
  unsure (1)..(401): n = a or c or g or t
ttttttttcaggccaaactaaagctttatgctataaaaacaagaaataaaataaggagatttataggccggctgattgtcagcaaacacaatatatttactgtattagcatttgctcacagtgcaaatggtacaacattacaccatttcaatatttcggtttttaaaaatgctgttttcattaactatattatattggcattacaatatgacaaaggagcaaatgaaatgttggtgaagaatttcaccttttcacaatatcaagcatatttttttaaccttagtataaggtactataaatccaagaaataaaaacatccacaaaatatattacatctnggtttgtcttttttctaagtactcaactttatacaaaagtctttcaaaaaatatcatttcccc

SEQ ID NO: 488 - DNA, 451 bp, Homo sapiens
  Genbank Accession No. N67041
aacatttcatggaaaactttttattggttttctggatagaaacaggaatttatttgccaggaagaatgatcccatcatacttcagctagaaccagtgatgaggatgattcagtcttaaaaaagaaggaaatccagtcataagctacagcatgtatgaatgttaagtgaaatacgccagtcacaaaagacaaatactgtgtaggtatccaaagtaatcaaactcatagaaacagaaagtagaatacttgctgccaggggttgcaaggaccaggaaatggagagctgttattcaatgggtatagtttcagtcaagtaaaataaaagaagttgtacaacaatgtatatatggttaacaatactgtattgtacagttaaaaattaagataaacttggatacttatttttaatggacaatttttaaaaataggtgtgggtaacaatttccaatggg

SEQ ID NO: 489 - DNA, 231 bp, Homo sapiens
  Genbank Accession No. N67575
tctatttagatcggattttattttgcaatatttattatatattcaattcaaatgtactcactattgtgctaggcaattgaaagtaaaaagtataaagctgcattttgcgctctcagtgaggtttaagtcagggaaatgaggcatgcacacaaaataacgagaaagtagtataatagctgtgatcattagttatcaaaataagtgaatgagctaataatcattgttagaata

SEQ ID NO: 490 - DNA, 334 bp, Homo sapiens
  Genbank Accession No. N67815
  unsure (1)..(334): n = a or c or g or t
tttttttttttggtaaagacttttaagagaaagaagtattttaaaaagtagcagtgctctgaggctcagggtgtaggatcgggggcacagctggtcccgggaggccccttgtgcacaggtggtggcccagggcnangtgctcgctcttgggggacgcgcggccgggggacngccatcgtntccggcccggggctcccggcgggctccggcggcagggacaatggcgaggccgctcaccacttnaggaanaccatcccggccaggacggtntagcccagcaccaggaagaggaccttnagcanacggtcactcttctcctccanctccttggcca

SEQ ID NO: 491 - DNA, 478 bp, Homo sapiens
  Genbank Accession No. N67876
  unsure (1)..(478): n = a or c or g or t
agtcaagtactttcttaaagaaacaatagcaccacattggcatagctgggccaaacaataaatgggaaagcaaaatgtgctacatcttttattctaagccttctcccaagtgcataaaatagtaacagaaaccctggagccacagagcatgagatcggtttcatctacacaaacattgacgttccaaggagaggaaggattctcaagggtggacaggctttttgtttgtttgtttgttttttaataaaattttcaaggaagtgatttcttttcagtattccattggatccttagggtgaatgtgtgtgtgtgtgtgtgtgtgtgtgtgtgtgtgtgtgtgtctgtgtatgtagggtgggtgttaagagattttcatatccctaagaaagagtggattcngatggagagctgcattaactttttcaggggaactgcctcatcttaaaaagtncaaatctcgtgccgaattcctgcagcc

SEQ ID NO: 492 - DNA, 415 bp, Homo sapiens
  Genbank Accession No. N68350
accggctaaaagctttaatccagagcctgccctactctgatagtaccagagtggagggcagaataccaaatgtccaggaaccaaaggcagggctgtggggacctgaagagcagcacagtggggcccgtgctgctgtgggggaaactgaggctgggagctcagcagagaccggtgtcaagagtctctgggaactgcataggcctgaggaacatgcattttcaagttgtccattgatggtttcgtacctgaatttctcaccttttgtgaacatcttgggagggtgggggttttgcaggggtgttaaaagcaaggcttgggagcccctttcctccagctggtggctccttctcagggcctggcctcattcaggccactttgtagagaaatgccctgacctcgcaggaaggatttcccc

SEQ ID NO: 493 - DNA, 285 bp, Homo sapiens
  Genbank Accession No. N69207
tttctttattatacttttattgtttgtttaattcatttttgtctgttacaaataaatttcaaactagagagtcacagatgttaataaactcgcccaatgcatcacctgcctccgaattccatagtttccactgccttgcgctacttgcattctgattagagaatggtaatgtgtgcctctctgaatcaagttcaagaataaatgccctatcctggctaacacggtgaaaccccgtctctactaaaaatacaaaaaattagccgggcgacgatggcgggcgcctgc

SEQ ID NO: 494 - DNA, 293 bp, Homo sapiens
  Genbank Accession No. N69222
  unsure (1)..(284): n = a or c or g or t
ttttatgagcaagcgtggtttatttcataaatgcaagggtagcttaacattgaaaacttaatctaatttataattatgtaaatgaaagaataaaaataatatgatcacgttaatatttacagaaactgcatttaataaaattcaacattcattcatgatttaaacaataaaagaaaactcttaacaaataagaatagaaganaccttcaacagtctgactttaaaaagagaaagccccagaaagcctatgnaaacattttacttaatggtaagataaagtttttttctaaaaa

SEQ ID NO: 495 - DNA, 320 bp, Homo sapiens
  Genbank Accession No. N72253
  unsure (1)..(320): n = a or c or g or t
cctttttcttaaggaatccattcatgttggaagcccagattccctaacatatgcactagtggttggctctgggaagtaacagtcaccagagtctggaagttcttcgcttgaactttgagtagccactggtactattggaagccagatggccanggtattggnaaatgggcaaggggaaatcccaagctgggctcaagagccgtgggttagggaagaagaaggtcaagtggactggtaaaaattctacttcaactgcccttattcatagatacaactttcctaacagtctcactctccaccagtcccatatccacaaccca

SEQ ID NO: 496 - DNA, 465 bp, Homo sapiens
  Genbank Accession No. N74291
  unsure (1)..(465): n = a or c or g or t
agagaataaaacttggatttattcagaccgtatgcttcccatttggggtgcagagtgggggacagtcatggggacagagaaaggcagtgcatttggcttctagggacatgctgattgctgactctttgggtgacctttgggccaccagatgaccagctgaatgatggagatggtgatgaaggggctggcggccaggtccttctggagacctcacagtgattccaaacagagaccaacgctgtgtccagttggctctgttcctctccagggattaaggagcagatggctgggaacactcagactaattaaagaaataaaaactctgggtagagggacactctggggggctccaattcaggcagtggtgtgcaaattcacacatgtcgatgcgtgggccaggcccgtgtgaaaaacatgtgtgtgtcngtatatattacatcctccacaagcanctgggagccccca

SEQ ID NO: 497 - DNA, 212 bp, Homo sapiens
  Genbank Accession No. N75870
tcagcactgatggaaaataccagtgttgggtttttttttagttgccaacagttgtatgtttgctgattatttatgacctgaactgattatttatgacctgaaataatatatttcttcttctaagaagacattttgttacataaggatgacttttttatacaatggaataaattatggcatttctattgaaaaaaaaaaaaaaaaaaaaaaaa

SEQ ID NO: 498 - DNA, 229 bp, Homo sapiens
  Genbank Accession No. N75960
ttaaattaatagatcaaaagctgctcgcattacagagacaaccaatagtatgaaaaaaccagcatgctatcaccaaaatccaaactaagaaaaactctacaaggtaaacaacacaacttcttcaacaaatatattgtaagagggcagagagatgctgatgaaccaataggtgagtgaaccccaaacctgcagcttcagatcacctgggaatttggtagagatgcaattt

SEQ ID NO: 499 - DNA, 440 bp, Homo sapiens
  Genbank Accession No. N78630
  unsure (1)..(440): n = a or c or g or t
gtttattaaaccagatttattctccacaagctgaagatacctgaggttacatgaggactggcattaaataatttataaatgtatttttgactgacagacttttatcataaggattcatgtgtttacaaaagcaaaatccaacctctccagagctagaaagtgggaaggtgcccgggctgcaacacagccttgggggaggatgaggccacataattctctctgcccacactctcagaatgccccaagaagttagtagctacacaaagccaagccttgggggaaaacctggtccgtggtgtggactctccaaaatgcagacccaaccggangccgggcccgcctttccatctggaggcactgcagggcttctgaaagcggcccatcccaggagcctggcaaacacccccagagaccctcaggatgcgcagccccggggcttt

SEQ ID NO: 500 - DNA, 144 bp, Homo sapiens
  Genbank Accession No. N79070
catttcttataaatttattacataataatattataataattattatcaataataataatataagaaacatagatctctgtggggcgtatcacaacgtcagggtcaggaggcctcaggactggagcagggggtgaaaccccggga

SEQ ID NO: 501 - DNA, 446 bp, Homo sapiens
  Genbank Accession No. N79778
atgttagaaaattttaatatatgattttggtagggccaatacatagtaaagacatagctttatttcaattgaaccgaataaaatgatgtatttcagtaaattaaggcaaaggagatagatgctatgaccagtggtgcaaaatttttcaaaaatttatacattagatttacctttacaaggttatagtcaagaataattaatttgtattttaagcaaactctactgcttttcaaaaaatgtcttaatcttgagtgaggaatagtgaaggtaatcttaatatactgtttaactttaaaaaataattttagaattatagaaaagtttcaaaaagagtatagaatttatgcacacccttctgccagctttccttaatgttaacaatgtacataaccataatatgattttccaaaaccaggaaattaacattacagtagtgttttaatttt

SEQ ID NO: 502 - DNA, 409 bp, Homo sapiens
  Genbank Accession No. N80129
  unsure (1)..(409): n = a or c or g or t
agtctagatgaatttattgccattcacatatttcatagaaaaaaagatgtagcaaacgggtcagggttgtacaaaaaaaaaaaaaaatccaggtttatataggttgctctatttacatctgagagcacagctgtcctggcatcaggcacagcagctgcacttgtctgacgtccctttgcagatgcagccctgggcacacttggcacagcccacaggnangcanggagcagcagctcttcttgcaggaggtgcatttgcactctttgcatttgcaggagccggcacaggcacaggagccaacaggcgangcaggagcagttggggtccatttcgaggcaaggagaagcaggagttcccgattcaagaggaaaacacgcagcgggacagattctcgtgccgaattcttggc

SEQ ID NO: 503 - DNA, 406 bp, Homo sapiens
  Genbank Accession No. N80152
acctctgtcaatgattcttttgagaaaagcacccataatttgctacttgaggattttattccctggattctctggatgctcattgcatgaaaagtggaaaagtttagatctatggaaacagaactgttgcctatatcggaaaatcagtgccttgtggaatacaggtaagaacagtgttgctcttgaaaaagtggacagtgggtggtctgaatgtgtcctggtccctggagtgggtttttagattgatgtggactcttcttagacttgtaagtaaaaaagttgtttcttcccctaaaagggaactcgtgcgccttagacctgggaatttgctgggaaactgaaacattctgtagactttacttgtttccaactgtatcgcagcaagaagtctatgtgccccaggatc

SEQ ID NO: 504 - DNA, 508 bp, Homo sapiens
  Genbank Accession No. N91461
  unsure (1)..(508): n = a or c or g or t
ctttacattgtctaatagacttgtttattattttaagctggtaaaaagagacttatgattcatgttgaagaaagagttatttgtgcttgatacattgaagacactgttcaaaagcagtttgtccttataaaaggatgacccctgtagtatttcttaggcaaggagggacaaattcaaccaacgaaaagcacatctcgccccgagttccccatgatttctccacatatagcaaaaaaatacacatcagtaatttatttgaacatgcacatcagtgagtaggcancagttctncggcggctactcaagacaacaanngggagaatatcagcattacctaaataaaaaagagaggtgaatcacaccattttaattgtcttaaaaacacggataagaagagcaattaaaatatagtcctaaacagtactagctaatgtagattacntaagtataccatatgattccactaatagtgctctgacaagcataaccnccagttctagttaaccag

SEQ ID NO: 505 - DNA, 154 bp, Homo sapiens
  Genbank Accession No. N91887
  unsure (1)..(154): n = a or c or g or t
atatttattattttattgctacattggaagtgaaaataaactgtaagaagctgccaaaggatgcaacttcatgaagattatgaaactattgaggcacccattgtagaaagttaaaattggcttatcctgcatgaggtggaagcnaaggcctccc

SEQ ID NO: 506 - DNA, 169 bp, Homo sapiens
  Genbank Accession No. N91971
gttttgaacacagatcactttattggcatggctttgttttaagaaaaggaaaagtgacaaagccaagagacagactctgctaacagatgcctgggggtggctggacatttttgcctcatgctgtgcaaagagggggatcctggcccacacatcctgctgattccttggg

SEQ ID NO: 507 - DNA, 139 bp, Homo sapiens
  Genbank Accession No. N91973
ttttttttttttttttttttatggggcagcgggggtctttattcgtcagattttccttcttggcctactccccaggtgtggccagggatagtccatacagtgtggctactgcaaggtcaggatggccagcagacccagt

SEQ ID NO: 508 - DNA, 395 bp, Homo sapiens
  Genbank Accession No. N92239
  unsure (1)..(395): n = a or c or g or t
tcagaaaactaaagcagcacctttattttatacatacaaacagtataaaatgtttattaggtaagagctgtgttttgtttacaatatattatattgcttcaagccaatgcaaaaagttcatacattatattccctatttcattgtgtttagaatatattatattgtttaaatgccantaccacagtgtaatttttttttttttaatactgaatctctggaataatggtaaggtcaaaatatattgtattgagagtttaaaaattaagagcaatttttaaaaatgtaacaaacatctaaatatctgacaataaaatctgaaatgctgtaacttcaacattaactgcaccatccaaattcttgtgacttacgcattttgccccatttaacctttctg

SEQ ID NO: 509 - DNA, 510 bp, Homo sapiens
  Genbank Accession No. N92502
  unsure (1)..(510): n = a or c or g or t
ttttttatacaaacaagtttcttttattgtttccacacattcataataactatagaacagaaagattgttttaatttgctgtcctacttcggtgacctgatgaatacactggtaacagtccccagtttgagtaagatcagttgaagcccttactgtataagtccaaaatttaagaaaaatgaatctcacgatgagcttcctcaggcttcggccgtgcgtggaccagtcagcttccgggtgtgactggagcagggcttgtcgtcttcttcagggtcactctgaaagggttgtctgggcttggtcttgcctcccaggtttcacgcgctgcaggttttacatggctgtggtggatccaggctgggattccttctacttcacagcggtgggagggctcagaacgacagctggggtctttccacagtggacacaaagaggtacgttccagttcttgatcaaatngatcactggggagaaaaggtgaactggggagaataantaacaggccattta

SEQ ID NO: 510 - DNA, 270 bp, Homo sapiens
  Genbank Accession No. N93798
  unsure (1)..(270): n = a or c or g or t
cacggctcctgttttattgccttcgggtgtccggagcacctgactgccccggggtctaataatttaaggtgccgagaacaggtcaggacaaggggtcgcaaaanaggggctgggggcagntggttacaaaatatacccccaccccacaacaaacaggctagaggagaccagcctggctgtgtcggganggggcgggcagagggcgcccgaccagccttcagagagacagagccacggccagcgccccagagggagtggcggagacaggac

SEQ ID NO: 511 - DNA, 399 bp, Homo sapiens
  Genbank Accession No. N94303
  unsure (1)..(399): n = a or c or g or t
ttttttagcaagacaaggtgtttttattgaggtctcaggaattgcaatttgggagacagattcagctagaagccacttgtgttctgaagagagagggtagaggaggggtttttaaaaaaagctgagggtgattagacaagttgacaagttgttttgaaagaggcaactggcttagtacaaaaatccatagtttattggttggtgctgttgaggagttgtagtgctggtgaaataaaattttccaggatgcagtggtcatcgcaatttggcccaattcaaaggttcaaggtaagctcctgtattgtttttttttttggagcttttaattttttttcaagttgcaggtcatgtagggagtccnttttaagaatggcttcctccctccaatttagagttcct

SEQ ID NO: 512 - DNA, 508 bp, Homo sapiens
  Genbank Accession No. N94424
  unsure (1)..(508): n = a or c or g or t
ttttttttttttattatttagaaatgtaaacatttatttaaaagtaggtagcaagttaaaaatgaatacttgcctgaaatcataaaacataatcaagttctttttaaaacagttaatttttttcctataatttactttcatcgaaagtatattatctttgtttaacatgctagatagaagcaatttagcaacataaaatatattagctatagtatgttcaaaagaatgagaaatataaattcagagatgagaccatcattttttgcagttaaaaaaaaaaatgttgattctggtgcaacatacactgattatccaggttttacattttagggctgaaaccctgaggaacctgctggtgactgtttagcactngagcagagttcagtgtggcatgcgcttcccagagttaaaagcnaaagcagactggagaaacnaaaaacccacatccttggcatttcngaggttttcacctggtaatcntagggtttccccaatttattagaatgtt

SEQ ID NO: 513 - DNA, 462 bp, Homo sapiens
  Genbank Accession No. N95495
  unsure (1)..(462): n = a or c or g or t
tttttgccaaacattagagtttgttttattgcatgacgtttgcataagaaaaaaagttattgaaaactgtaaggcatcatgcaatcattgaataagctaattattaactgtacacttaagataggtggacatataatctaaaatttaaaaactagttccagaaaagtacataaaaaatttaacatgatgagcttttaaatatggtttatagtttcatgttgttaaaaagtgcttcaaatgtactgctggaaagttgctctttacaaatggcgctggggtgatgtcagattataaactgtaaaaaccaagtacttttatggaattagaaagctaacattgtgatccccaacttcttgaaccagttttcaatccccattcaaattaagttgattaatattaataactaaaaacactggtttatacccccaaaggcttggatccagtagnctgtggccaccaatc

SEQ ID NO: 514 - DNA, 197 bp, Homo sapiens
  Genbank Accession No. N98485
tttttttttttttttgttatatacattttattgaaaaaaaattttacaacaaaatattttggcaaactgtaaaagtatacataagtgcaaatatatcctccttttaaaatacaagcaaagtgtgagtatacacggtcataaaaatatctttaaaatatggtggtagaaaacaaccttgtaaaaacgttgtattgtcc

SEQ ID NO: 515 - DNA, 340 bp, Homo sapiens
  Genbank Accession No. R00144
  unsure (1)..(340): n = a or c or g or t
tctaaaatataattgtttatcccaatgtcactccacccaggctgcagtgatggcnaaatcactgtaacctcgaacacctggcttcaagcaagcctcccctaagcttcccacactgttgggattgcaggcatgagccactattgtctgagcagtggctcttcctgcaggctggcttaccctctgcatcccacccatcctgcaggtgaggctgaccatgcccctagggtccaagagtcaagggtaatgaacacacccatcacctntcaaaagtgacggctctgtcctcatcaatatgagggantttcctcanttcctggcataatcagctcaggggacacaa

SEQ ID NO: 516 - DNA, 417 bp, Homo sapiens
  Genbank Accession No. R01257
  unsure (1)..(417): n = a or c or g or t
aactattcttgttttatattttattatactggaacagctcgtgtcctctgtctcttgcctcggtgcctgggtggcttgcgcccacnatctcccccctttttattaactagaatcgccatcgccatcattgcttgttgttgacttcggacttggtttcggactccttagaggcatctgcagactaaaaggagacaacataagcataccaatattaataatgccagtaacaacaatgatcctctgacgggtttgagccatttgaagggattaaaatcagggtaattgtttagttatgccttcaaaaatgtgtgagccagggaactgtgggataaatggggcttgtgaagcctccaaagatttgctctttaaggttgtggaaatatcccaagggttaaggttatcatcccnggggttttt

SEQ ID NO: 517 - DNA, 258 bp, Homo sapiens
  Genbank Accession No. R02003
  unsure (1)..(258): n = a or c or g or t
tganttntcatagggctcggcgtgggaacagagcgcaggagtctggggtgctccaccggcggggagggggcgcgcagtccctcctggggggatcgggggtgctaggcaggggtggtggcgcaagaagggtctcgggagccggggggtctggaggtggaggagtctcagcatcttgtttcctgtgctccttcccagcaggtgcaggcccttctgcctggggtcccctctggaaggccctcggtttccccggcgccaagg

SEQ ID NO: 518 - DNA, 294 bp, Homo sapiens
  Genbank Accession No. R08850
  unsure (1)..(294): n = a or c or g or t
ttccnaaancaggcagttaatgtgctgacatagtaacaaggtttgaaggaggaacatctcatgcacgtgcgtggaaacccaattgtcatgtgtatgaactacaaaaggatggggaaaagaacacatttcctcacaacaggantacatgagattagaaagaaaaccggantgaggtagatgcatgantgcacagacaaggntatgtgacaggaagctgggtgacattttgcatctgacatagcagtacacctagagagcccaaggaantccacccccaagttaccagaggcaaga

SEQ ID NO: 519 - DNA, 413 bp, Homo sapiens
  Genbank Accession No. R09379
  unsure (1)..(413): n = a or c or g or t
ttggnttgagtttggcctttcctactgcagccaggtgagagcttaagatgtcagtccccaatatcttcacagagtgcctttatgaccagtttggagaattacgatggtaaggggaagaggcagatatgaagaggaatggttaggggaattgtcattcataactctgtgctatattacttgaggggctaagaaaaatgtatggtcagtgaaacacagtagtgtacccttaaatgccttataaaagaccatccatccagtctgcgcttttgactgtgtgcaagtatcagtaataatgcttttggggggctcagatgaacagcgaacacccaatcagccaggggctctgggaagggaaagctcccaaaaatgaggaagtcccttccaacacccatttttcccattactgttctcac

SEQ ID NO: 520 - DNA, 319 bp, Homo sapiens
  Genbank Accession No. R10896
ttaagccatccaagtaaaaaaaaaaattttaatttaacaatgaaaaaggaacttcaaagggtttatgccaaaaaacaaaccagtcctctgcagcctaactcatttgtttttgggctgcgaccattgtagagggcgatcaggcagtagatggtccctcccacagtcagcgccatggtggtccggtaaagcatttggtcaggcaggcctcgtttcaggtagacgggcacaccatcagctttctggaaaaacttttgtagctctggaactttgtttttcccagcataatcataccctgtgggaatcggaggtcagtttagtt

SEQ ID NO: 521 - DNA, 318 bp, Homo sapiens
  Genbank Accession No. R11526
  unsure (1)..(318): n = a or c or g or t
tttantagcgcgaccatttctttattaaattatacaaaanggnnggggaggggggcagctgtggggctcggcaanacccnggccccaccccggcctggcgctgtctgagaagaggggatctgagggagatccagggatcaggcaggatagggatggggcaggacatgaggctgggggatgcagaggttaggtgggagaggctaccngagaaggaatgaggctggtaggggagggagaaagagagcaaagagagagaggagcaattgggggccagctggagagctcagatggagcaggtcaggaggtggaacaatggca

SEQ ID NO: 522 - DNA, 362 bp, Homo sapiens
  Genbank Accession No. R15108
  unsure (1)..(362): n = a or c or g or t
tttttttttttttttttttttttaacggtagaaccaangtttattaatgacagcctttattacaatcactctcaagtgtaaaaaataaagggtgattaattaatatttaaaactcactcggacttgctgtttggcctttcagtggatgtgccaaagggaagggatcttgcctgattctgaatcaattggccagatggagttcactggagaatgaggcaatcaacaaaaaagacaaatgatgccaactggagagagctcgtgtcttctccatgttggaaggacattacaaaatggcaactntgggtgggggcagagatgaagtaagacaaccttacagtcggagtaagatgtgaatacccttt

SEQ ID NO: 523 - DNA, 416 bp, Homo sapiens
  Genbank Accession No. R16983
  unsure (1)..(416): n = a or c or g or t
ttgcagagacaagtgaacatttatttttgtacctttcttcctatgtgtatttcaagtctttttcaaaacaaggcctgaggaatctccagattcaattatgtccctgggctttgtcgacagctgcaggagtcttagggagccttgtacaaatgctagagttactcatttaccaacattaaacccgagaatagaagatgcaacaaagcaggtttccttcctccatgggaaagtgctgatttcagacaagggcagcagccaatgtaggaaaatgctgggaatttttccttgggaactgggactgtggatgagagggtgctttgcccatggaaccataaggctactgtcttttcttttggncccttccctttcccaggtttttggaaggnataaaggccgggaaataaatctttctctgg

SEQ ID NO: 524 - DNA, 234 bp, Homo sapiens
  Genbank Accession No. R25410
gtggacaaatcttttattttctgaagacaagtgatttgaagtccagactgaatggcatttaagaattaggaatcctgcgtgccatcctggagtgaattaaactaaattagagtccagaatatgcagcttctttaagaaaaaattctcctctgaaatattttctttcccactgcattaagtagtgttcctcatgagacatctggaaaacattgattgttaaaatgtgggtctggg

SEQ ID NO: 525 - DNA, 419 bp, Homo sapiens
  Genbank Accession No. R28370
  unsure (1)..(419): n = a or c or g or t
anatggatattagttctttattgagaatcagaaatattttaaatttactaaattcagaggtagtcatggcctctccccaataaactttacagtcttagacaatttgtgcattttaataaattcttagttatagtattaaagaaagtggctgggcgcgggggctcacgcctggtaatcccaggcactttgggaggtccagggcagaggcagggcagatcatgaggtcaggagatcgagaccatcctgggctaacacggtgaaaccccgtctctactacaaacacaaaaaaattaggccgggcgtgggagacagggcaccggtaggtcccgggtacttcggggagggctgaggacagggaggaattgctttgaacccggggaggccaaggttncagttnaggcccgagattcacgggnact

SEQ ID NO: 526 - DNA, 431 bp, Homo sapiens
  Genbank Accession No. R31679
  unsure (1)..(431): n = a or c or g or t
acttccaagatnaacatttttctgtttattcttagaatgtgaattttttttttcaactcagggccaagtacaaacttttgatttttgaaattttttcaactcagggccaagtacaatcttttgatttaaaaattttttttcatgaacaaaccatcagtagttattaaggagcccaagaaataggagatgtgaaagcaggatttctttgtgtttcctttgaatgttgttattttgagtattatcattatcagggtaggagggaaggaaagggtagggctggggaaggtagggtccttatggatatcttgactatgggatccccaggatttacatttcacctggtcacagnggcacacataatttaggataaacatgttcaaggaatggacataaacagaggggtaaacacaggggggctttacatttggggg

SEQ ID NO: 527 - DNA, 247 bp, Homo sapiens
  Genbank Accession No. R33627
  unsure (1)..(247): n = a or c or g or t
aaaaaaaacttttgaatcatttattctttggttgtctacanagacacttaagtactgtatcgctgtcatgcagcggcctgtggaggccctgggggtggctgggcctgtgtcctgagccctcagccagatccagggggtgcggtgtctggtcatgtccactccaagagcagtagcaccatgtagaaggctgtgagcagggtcccctcggctgagtggcagatgtaggctcactgctntgcagccccaa

SEQ ID NO: 528 - DNA, 282 bp, Homo sapiens
  Genbank Accession No. R36881
  unsure (1)..(282): n = a or c or g or t
ttttttttttngtgattatacgttttattagactcngggaggggtaatggcaaggncttcatcangtgttccttcaaattaaaaaaaaaaaatacaaaagctacgtagaaaacgtcagatcagacgactaaactttcccgactcagggccaagttcttcttgagcctgcgctctcgggacgcctgcgagtcggtctccgagtacgggggcggcgcgggcgggtagtaggcctcttcctcctcctccttgtggggtctcctcctctcctccgaccccttcttc

SEQ ID NO: 529 - DNA, 428 bp, Homo sapiens
  Genbank Accession No. R36969
  unsure (1)..(428): n = a or c or g or t
ttttttttttttcaagttgctttttccctttttattaaaaatagactcaagcactttantgtatcatacaaaagtttcattcgctggtggcagccacgggaaagactggccccgtagcactgattttccacctcccctccagggacttgggtcccaggagcagtgactgggcctcagagaaagcccataaagactgcttactctggaagcagccgactaggggctnttccgcgagcagctntccccaccccacccaatggcaaaagttagatactcgaaagtgcctcttcagtgccaagataaactaacaagtgggagtgaaatgggaaaaccctttgattattttactattttcccaggggcctgggggnttttnagtttttccctgcaattcaaagtccttttttcccttacaataggggggtagg

SEQ ID NO: 530 - DNA, 507 bp, Homo sapiens
  Genbank Accession No. R37588
  unsure (1)..(507): n = a or c or g or t
tttttttttagaattcaggtagtgttttggtttattatcttagtgttgtcacaagtgatagaaacccccangaagtnggaangaaagagctccntgcntggacctacattttgccattcccctcttgccctgggntcagaaccttgaagcctttgcttggcccttgcatgttaggatatggccaagaatcagaaactgatgcgtttttccagcactacctgtgtgctgcactcatggaaggtgggaagctatacacaggtatccaacttggttataagacaccagttcccacagggctggatttctcagctgtctgggtaaaccagtggcacttcactgccccaggggtggctggctccctttctgaatttctgtctcaatgtgatataattgccaccattcaggatggctacccacattttggtatgaacaccatgacttctttaaggcaacgggggctttcctnctcagaacagtgcccctgnaatttttcctcctgtgggcttt

SEQ ID NO: 531 - DNA, 239 bp, Homo sapiens
  Genbank Accession No. R37774
  unsure (1)..(239): n = a or c or g or t
tttttttttatgtatttccaaaatcacaaaatgcacaacattcatngtttttaatattgcaacatggaatattatatacagattaaaaccacgacagcaaaaacactcacacggtaccagtttcatatcaaaacaaaacacacaagtgctttttcaatattaaaacgactgtgataaaaacatattaatattttgaaccatgtttacaatagngcaaaattcatattttactaaataac

SEQ ID NO: 532 - DNA, 237 bp, Homo sapiens
  Genbank Accession No. R38678
  unsure (1)..(237): n = a or c or g or t
ttttttttttttttttttttttttttccngttggaaattttttatttaccactgcaaggtttttgctccaaagtgtcacaccagacatatgactacaatgtctcatgcatctttttgtgctttagttcatgactgcaaaacacacacttagcatttgacaacaggaaacacagagggcagaaacaaatcacaaggactagttggtttaggttacagccacattttccccggggctcc

SEQ ID NO: 533 - DNA, 401 bp, Homo sapiens
  Genbank Accession No. R38709
  unsure (1)..(401): n = a or c or g or t
tttttttttttttttttgatttctcaacatcaaagtttaattattacaaaatagttcaagcaacatgatatgantttcaaaaactgtatgttgcttngcttcctngttttgctccaacactaatcatgctgaggtttttgaagcacagctatgactagggcaggcactcttgatttcagtcacaaaaacccttcttggatgaacaatacttgttcttttcagaagaaaagcaattttaccttttctatttctattatgaaaaacagagctaaacaatttttgtatttttagtagagacagggncccaccacgctggccacgntgggtctcganctcctttcaagntgttctgcctgccccggcctnccaaagtgccggggnctacaggatntgaggncacc

SEQ ID NO: 534 - DNA, 340 bp, Homo sapiens
  Genbank Accession No. R39467
  unsure (1)..(340): n = a or c or g or t
gagccacctcggggtgactgagcggaaggccaggcagggcttccctcctcttcctcctccccttcctcgggaggctccccagaccctggcatgggatgggctgggatcttctctgtgaatccacccctggctacccccaccctgggctaccccaacggcatcccaaggccaggtgggcccttagctgagggaaggtacgagctccctgctggagcctggggacccatgggcacaggccagggcagcccggagctngngtgggggcnttagtngggggttgntgcttgacccccagcacaataaaaatgaaacgttgaaaaaaaaaaaaaaaaaaaaattt

SEQ ID NO: 535 - DNA, 197 bp, Homo sapiens
  Genbank Accession No. R40431
tttttttttttttttttgtcttgtgtgtatttttatttcagggaaagaaatgagggatatgataagaaaaagtctattaaaattgtaaggcttactccagacaccattgcttaaatcactcccctcgcacacagagagaaaacccctgggcaagtgcacaaaaacactactcataaaagcacgggtgaccagtgaac

SEQ ID NO: 536 - DNA, 464 bp, Homo sapiens
  Genbank Accession No. R42241
  unsure (1)..(464): n = a or c or g or t
ttttttttttttttgaaaacagaattatttattgcatacagcatgggactgtgatcaacctggncatcaaatgccgcgatggctgacagggcccaggcggcgggagtgctgggaagcccagtacacgtgctccctctctgtgggactccgggatccacggggcggatggttctntgagttgcgagttgttcctgtttgtcttccagcccccagtcctccccggccactctgattagccagcctagggtagggcctggcataaagtcacacaggcaaaccccagaagaaggaaaaagggcacctgcatgaacaaagagttgggttgcagaggntgcaccggggtaagacttccttcatgcagttnggagtccncccatgtngggacatcaggagatgncaccncacagaattggtngctaggttttnctgggttttggcccagagaggctnattcccattntttt

SEQ ID NO: 537 - DNA, 318 bp, Homo sapiens
  Genbank Accession No. R42424
ttttttttttactttctgtgagcttatgaggccattctgcacattatcaaaatgaaatcattatgcagtaaccttatatatataaatccaattttttcctttgtagaagaaaaccaaaataattttacaaactacatttaacttagtaatataaagaactgactagtgtaaaattttgaaaatctaccactttattttgaagggaaaggtacacatccttcaaaaccccggctaacaattcctaggttcagttttctattatacaaatcaaaaggttaaattccttgtgggcactaaccaaaactttaaaaattaacg

SEQ ID NO: 538 - DNA, 243 bp, Homo sapiens
  Genbank Accession No. R42607
  unsure (1)..(243): n = a or c or g or t
ttttttttttaggctttgcaaaatacatttaatgatctctttcaaacaagtgttactcgngttttctttgctttctggagctaaatggggtatcgatgaggcagcagtcacgggagacccaacatgctcttggcagatactggattatccaactatcaaaaatggagctgtagaagaggcatgttnaactggttaaaacagaaagggtattttagtacggtcaagttgatctaagtacagagg

SEQ ID NO: 539 - DNA, 270 bp, Homo sapiens
  Genbank Accession No. R44397
  unsure (1)..(270): n = a or c or g or t
tttttttttgtattgtatacacagtggaaagctggttttatttgggagacaatgggagcttttacattgttgagcaaaggagtgacgagatcagtcttgctttttagaaagattagtttggcagttacttatttgtaaccaganttagacagcaaatcgggatgcagggggagaagtcaggtgactattagtctgcgagtaattctgggacaagagcagtggtaatggaattnaaagggattaaagtntttaccaggttttggcataaat

SEQ ID NO: 540 - DNA, 367 bp, Homo sapiens
  Genbank Accession No. R44535
  unsure (1)..(367): n = a or c or g or t
tttnttccaaaaatcaccacctttaatactccccggtcctgcacacacccacagtctcactgggctccaccctcacttactgcccgccgtggatggccttggaggctgcctgcccgcgccaggatgtttggcacaaagagcagccccgaagcccnctnaatgntctcgatgggcaccaggtaagcgntccagtgggatggcctnatccacaggtgcgttgggcatcacgtaggtgcggantncaatttgcccanctgntncctccaggttcagcaccttgaagaagtttgtgggcactgccangtggtttttgccgatgacctgggtantttacgtaggatttcccatcagnctctgtccatgggac

SEQ ID NO: 541 - DNA, 398 bp, Homo sapiens
  Genbank Accession No. R44714
  unsure (1)..(398): n = a or c or g or t
tttttttttttttttttttttttttgattttnagcaggnacagttttgattttattgcaaggcacacaatcgtatatacaatgcataattatcatcttttaaagtacaagataaaaatcatatacattatagtaaagancatatgagtatattcttgtttcagagangaaanttgccttaaggaagctgggttataccgtttttggatgtgattttcgtatttatactgaatcatccgaacagctcttggttaggaaaataaatctcattgatagggncacacaacctttcacaggctttcactttacaatgttccantttaaaggtcagccagtgtggctccctggattttggcatggggtcatcgttttttcatcccnggggtcttgggttggaaa

SEQ ID NO: 542 - DNA, 364 bp, Homo sapiens
  Genbank Accession No. R45654
  unsure (1)..(364): n = a or c or g or t
tttttttttgccatgtttcatttcctttaataatgaaaatccataagggtttaaaatactcttagacacacctagcttagcaaatatcatggacctctacatttatgtgaattcacacatgagctagccagcacctcagttctggctggccatcgacacctgcttctccctttggccctggggccagggagccctggaggccaggttcccctctgcctcctccaatggagttgccagcatcgcctttatctcccttctgccccaggaggccaggaagcccaggggagccttcagcccccttctcacccntntgccccntntttnccagcaaacctgggggccccngnttcccttttgttcctgg

SEQ ID NO: 543 - DNA, 229 bp, Homo sapiens
  Genbank Accession No. R45698
ttttttttttttttttcattataaaagtcagtttattttccctttctgtgtttcgtattttccctttttgtcagtaaatgagcaatacactgactggaaatctgcatgattaaataacattaacaagttcataaacacaccccatatcagagtataaagcaagaggttgaaaaatatcccctaaccgaatgccaaattagggtatccctcaaaattgcacattctccct

SEQ ID NO: 544 - DNA, 254 bp, Homo sapiens
  Genbank Accession No. R46074
  unsure (1)..(254): n = a or c or g or t
ttttttttttttttttttttttttttttttttattgccaaganccaaagaaaaaattttatttacaatagagaattttatttgaaacatgcatttcttgtttttttaaaaacaaatcagcaaatgcagatcaagtttacactccttaaggcaagagtccctatgcacgctgtacatgttcatattaaatccaaaagctgctcacccggggaacttgtgtacaaagggcaaggccaaggtcagcaatgtgtcttt

SEQ ID NO: 545 - DNA, 338 bp, Homo sapiens
  Genbank Accession No. R49138
  unsure (1)..(338): n = a or c or g or t
ttttnttttttttttttttgggagttgagatatttattaacagatgggggtgctgggggtgggctcctgccccagagggattgacaggtggatgccgggtggggagggctgcagggctggctcctggcctctntcctggcttcatggtcctgacanctctgggccancctcagggctgggagcgtactntagcaccancctttcaaagtcgttctccttggcctggtactccttgatgaagggatgggacctgtgggcatccttcagctgggacaggtatcggtttgtcacctcagggggnttgccaggntgctnggacaggacgatgaggttnacca

SEQ ID NO: 546 - DNA, 284 bp, Homo sapiens
  Genbank Accession No. R49327
tttttttttttttggaaaaagaaatttttttttaattagaaaccaagtttacatacggttaaatggttactaaaagctcagttgtaaccactcctaacaccactagcagaacctcaagggagccaagagctcttcccttttcccctgttaatttccagtataatgtagcagcacaattatttcatgtcacatttaagaagaacaagaaccaatttatataaaggtacaattgtatatccttaaacattccacataaacacactgtcaaaactcactggatatgc

SEQ ID NO: 547 - DNA, 414 bp, Homo sapiens
  Genbank Accession No. R51831
  unsure (1)..(414): n = a or c or g or t
ttttttttttccattttaaattattttattgtatattaaaaaaccaaataaagcaataactttaaagacctcacacacacacagtataaacacctgggtaaggttttnttcgtgtccatgttgacaccggaactaccgttaaagtgcaagttttgttttgtgttcctttgtgcagtttcactcacatgtaaacaagtcacttggctatgatttgacccacgcccccccgnttagtttcgggagggcagaggctctaccggctgtcacagcaacccggantcacagncaagntaatgccccgtgggtcctgaccctgcaagcggggcatgacggtttcttgangcctagcagaggntggttaactttcacatncctcccccaccccgtggttcactnttaggtttttgagaagtt

SEQ ID NO: 548 - DNA, 538 bp, Homo sapiens
  Genbank Accession No. R56183
  unsure (1)..(538): n = a or c or g or t
gtaagatggcggggtacgacttaactactcgcatcacgcaccttttggatcggcatctagtctttccgctccttgagtttctctctgtaaaggagatatataaagaaaaggaattattacaaggtaaattggaccttcttagtgatgccaacatggtagactttgctatggatgcatacaaaaacctttattctgatgatattcctcatgctttgaaaaagaatagaaccacagttgttgcacaactgaaacagcttcaggcagaaacagaactaattgtgaaaatgtttgaagatccagaaacgacaaggcaaatgcggtcaaccagggatggtaggatgctctttgactacctgggcggacaagcatggttttaggcaggagtatttagatacattctacacatatgcaaaattcccagtattgaatgtggggaattacttcaggagcagccagaatntctttatttttttcagagtgttggttcccgcaaccgacaganatgctgtaagttcactctgggggaagctggcctctg

SEQ ID NO: 549 - DNA, 364 bp, Homo sapiens
  Genbank Accession No. R56602
tttttttttgctgttatgattagatatttattgagcaccaggagagagtcagaacattagacttatagtggaggagcagaactgaaccctggcctgtgaaataacaatttcaattaaaagctgtctggccctgaagaaagagaaatgatcctggatatagctggtcctctgagctggcagagctgagcctccctcgggtcttctggtgggcaagatgccaaagttgaatagtgtctgtagggcatgatgaccaagtcctagtgctatgggcatcttccctctggtatttaggagaggagtaccagaagcccccggcagaggatactaggaagggcccagagccaaatccagcagctgggcttac

SEQ ID NO: 550 - DNA, 181 bp, Homo sapiens
  Genbank Accession No. R58878
  unsure (1)..(181): n = a or c or g or t
caaacaggtcatttgtttttattttatggatacaccaaaattttataatgagttgtgtttctattttggctttatcttccagaaacttagaaccaaatatgcagtcctcttctagcaactgtatgagagcaggtggtaagcttctatttnattgcccttgttttcccttgactccaaatct

SEQ ID NO: 551 - DNA, 485 bp, Homo sapiens
  Genbank Accession No. R59593
  unsure (1)..(485): n = a or c or g or t
ttttttttttttttttgccattgaaaagaaagtttaatgttacaattctccccagaaatgagggtcatggcatgccacagggggccacatgaaactctgtcacaagcagagaccacaaagcagagagaggacctgagactatgcctttattgctaagtcagtgggatggatctaggtggggatgtcccctgtttgggcataaagcaaaaacagacattctatggttgtcactgggaagtctgtgatatgagttttgtgcacccacgagagagggcttaaaaggatgatgtaaacaactttagcctttagtttgtccctgtacttaatatatgtcaaatagggcaaacacaaattctaaggtaaacacagattagttccgggagcagcttggcttatggcacacnttcagggaaacaccttggcttaaatcttacaggggaccacctgtttttttcaaactttggggttattccgtttctgacttt

SEQ ID NO: 552 - DNA, 372 bp, Homo sapiens
  Genbank Accession No. R60056
  unsure (1)..(363): n = a or c or g or t
ttttttttttttttataaaaggaaacagaccaacatcatagtgttttattgacaaaaccataggaaaaggcagttttaggatgtaaagtaaaaatggttctctgaaatatctacacaaacgtgaattctgaaaagttttcattaaaatcgtatttcatacaattataaactaatgaggaacaaaacaattttcaacttctccataacccagactgagcttgatttatgcttgccatacagaagcagganctcttcccagagagggtggtggctcccacacagctgacagccaggtttggctgtttacctaagccccatcttcccagtcggtgttcaaaacaagggcacaaggtctgggcttttcaaaaaaaa

SEQ ID NO: 553 - DNA, 387 bp, Homo sapiens
  Genbank Accession No. R60777
  unsure (1)..(387): n = a or c or g or t
tttttttttttttttttatttaaatggaaacactaatctttattttcatcatgctgaagtgtgtggttacaatttccaataaaacactatatataataagcaaaataagttagtacattgtaaacttatgcacagtttcatcaattaacagtttaagancaaacaagccatttaagactttggagctacatttagtaaaanattgcaaacactcaaatcttatcaaccccaagtaagacagtaaagagctattcaagacttcttcaaaccaattacacaantacatgtttatttttggttacagtcccctggctatgcacaaggaccattgggaatgctgggancaatttacacattttaaaaacgggcaaaaaggcaaagcaaggg

SEQ ID NO: 554 - DNA, 350 bp, Homo sapiens
  Genbank Accession No. R69417
  unsure (1)..(350): n = a or c or g or t
ttttgtggggggggcaactaaacaaacacaaagtattctgtgtcaggtattgggctggacagggcagttgtgtgttggggtggtttttttctctatttttttgtttgtttcttgttttttaataatgtttacaatctgcctcaatcactctgtcttttataaagattccacctccagtcctctctcctcccccctactcaggcccttgaggctaattaggagatgcttgaagaactcaacaaaatcccaatccaagtcaaactttgcacatatttatatttatattcagaaaagaaacatttcagtaatttataaataaaggggcactattttttaatgaaaanaatttg

SEQ ID NO: 555 - DNA, 284 bp, Homo sapiens
  Genbank Accession No. R71395
  unsure (1)..(284): n = a or c or g or t
tggaaaaaannacaactttattttcagtcatttctatttccttggttatgaacaaaggtagcaaagtgcagttgtatcagcagtgccaatagaaattacagagtttttcatatccctttacagtttgccacaggtatcttaaaatattgtttacactcatctctcttcagtttaccattgtttaataggcctaccctcgatctttttattcaatatgttaataaagaaacctatacacatagtatcacgttatacattttaaaantnttttgacaactgtatat

SEQ ID NO: 556 - DNA, 480 bp, Homo sapiens
  Genbank Accession No. R71792
  unsure (1)..(480): n = a or c or g or t
atttattgcaaactccctaatatcacatgctagtgcgcttgnaatttcactcaggaatgttccgggatgggggccagaaggtagagagcaccatgaaagtacagcctgcgaggccggattgctaaggggcagacttcatgccaatggagggacaganttcaggaccagtctggatgggctaagctgccttgggcngnaaggagctggatcaggccagggagcttgaggttctcctttggccaacccaccccaggtttccagctcctcctcctcactcagggtcctgcgcggtgagggaggtttgggggaggttcgcggctntacagctgccagggnttttggggcactaccanttaagcntgaggcccccagtcagtccttcactnggggaaagtttccaagganttggggctttcactngcatttttttcagacangttccggntaaggggttnaagctttnccttnggggggttnccc

SEQ ID NO: 557 - DNA, 392 bp, Homo sapiens
  Genbank Accession No. R84421
  unsure (1)..(392): n = a or c or g or t
acaaagagaaaattttattttcttattcttgaaatgactgtacgatttttcaatgttaaagttcactttcaagtatgatcaataacaagacatcaaatgtaaaaattatgctgtattatcattttctccattgcttcttaaaccactgaaagtaatttcacaattcaccacatttaggcatcttctttttcactttcttcattttttacttctttaggcaacaatggatcaatcttcagtaataaaccttcacttgttgaactacgaaggaaagcacgtaccacaangggacccaaattcaggcgggtctgtgcctacaaacttcattaataactgcttgcggattgggcagctatctgggtcacttgacatatccaatgttggctattttg

SEQ ID NO: 558 - DNA, 412 bp, Homo sapiens
  Genbank Accession No. R85291
  unsure (1)..(412): n = a or c or g or t
ttgntatttacangtatttaaatgtgaatattcactacctatttgttgcangcctgcantttttatactgggcttgccaaaaacccgaacagctttctactttgacaatgtatcagaatttaaatcagcaatatgttaataagccaagcaaaggttatatatgcaaataaaactgttgtctataacctcctgttacactggggcacagcaaaagtcatggngtagtcgcatgtgaacctgtccctttcataggctgctcattgccggggaacatcagggaatagccatttgggaaggggtcatcagccctcccancatccgttttctgtcttgtcttttccctatgaggcagggggnaattccncggtggggccccaatccccagtgcaggnggctcagcctntggcctttg

SEQ ID NO: 559 - DNA, 380 bp, Homo sapiens
  Genbank Accession No. R88209
  unsure (1)..(380): n = a or c or g or t
acatcagtcagaaaattccagaaaatggaaagtactccatcatacagcaaagtaaatcaatggttgtttgaagagcagagagaaaaactttataaaggctccaagtaaatacaaaggtgatagattagataaattcattatggngactctgatgatggtttcacgggattataataaaattcaagacttatcctacagctcaaatatgtgtactttattggatgtcatttatatctttattttatttttaagatggggtctcactctatcacccgggctggactgcagcgttgcaatcctaggctcactgcaacctccgnctcccgggntcaagcaatcctcccacatcactaaggnccagggtacatgccnccctnccg

SEQ ID NO: 560 - DNA, 379 bp, Homo sapiens
  Genbank Accession No. R89840
  unsure (1)..(379): n = a or c or g or t
ttaaattttattatagtaacaaagtgactatttttaataataaaagcagagtgcctgtaggaagtggatggccctatctcaggccaagtctccttagtgtttcagacctaggctgaccagaatagtcttctagaatgtaacatttatccaccaggngtcattatttaccaatctgacaagccactgggctgtctccgngcattcaatggttggaatcaaggctacagaccagantaggagatgaatgaaantagatttagaaaagggcgttgtggctggaatgcagcttgcagtgtgggagggcagggntgggagggtaaagagggctctttgaaagnccagtntcactttcctgatccaagtttcttaagctgatact

SEQ ID NO: 561 - DNA, 378 bp, Homo sapiens
  Genbank Accession No. R91484
  unsure (1)..(378): n = a or c or g or t
tcaaatgtcagatttctttattaaaatgtgcacattatagtttacttaaatacaaaatgttcactttccttgcaggtaagaaatttcactgacatttccatgtcaattagcttctttttaataaaaatccttccactgaaaataaatangcatttaanttactgaactattatattcattagtctcaatacctcttaaaatacttaaaacttgngaaaatagactctaaacatngcctaanggngggcatccagctctgaggcaggccacacaaggtgtgtctgaggtatgggccatatgactccgggggggccacctccacggacgggcccagccccaccgacggntctgctggaaaatcccggcccctcaggcggg

SEQ ID NO: 562 - DNA, 223 bp, Homo sapiens
  Genbank Accession No. R93908
  unsure (1)..(223): n = a or c or g or t
catatatnnaatantaaaaatcctgggaggcattgcactgtaatagtaagtctgcccatccaggntcatgcatgtcttttctttcattcaagtcttattttatatctttcagtaaattttcatatagatcttgtgaatcgaattatttttacatttcaaattcaactaacaattattaataganaatgaaaacattgatttttttcaatatttattttgtgtc

SEQ ID NO: 563 - DNA, 334 bp, Homo sapiens
  Genbank Accession No. R96924
  unsure (1)..(334): n = a or c or g or t
agtaaactttattngggagatggggtgaatccatcactggttactggaaccctgagtctgcattttctcctcaggaaggcggtctgaaatggagtgggctgtgtttggcaagggttgtagtggtttggaatctctcacctgcttggctcccgagctgggcctcaggctgntctccccagagtaaatgcccgggatcattgaggaagcgttggctgcgctgggcatgttagggcaggtctgtacggtccagcgctgtcccctgcagcgtctctgggcgctggggtgcaggtnaggcccnggacgaggagggaagagcagcctcgacagagagtcc

SEQ ID NO: 564 - DNA, 510 bp, Homo sapiens
  Genbank Accession No. R98442
  unsure (1)..(510): n = a or c or g or t
gtactcattaatcccctcctcaatttttaacagaattataaaagcaaagtcaaaaggtccttcaggatgactgggaggcttcctaggctaacttttgcatttgaaaatggaaaaaataaattacttgatatttgtgataagactaagatttcttaaaagtctgcacatcaatatattacctgggcttaggagggtgagggcacagtatccatctgcaccctctcctcgtattttttaaaaacaggcaaaatatgtaagaaaaggctggtgcacgttggaagacagagcgtgcctgtctatgccagtgctgctgtgccctgcagcctgggnaggatgggagtcggatgctggggcctcatgnccacttagggccaataacatactcaagactctacagccctttcaccagcaaagtatgncctgaggggaaccactgggtgttgggagttgaaggcacacaaagcaggggctaaagggcaattggggtttcacggtgcaggcgccttgagg

SEQ ID NO: 565 - DNA, 386 bp, Homo sapiens
  Genbank Accession No. R99092
  unsure (1)..(386): n = a or c or g or t
tgtagagacgttttgccctgttgcccaggctggtttcgacctgctgtgctcaagggatctgcccaccttggcctcccaaagtcctaggattacaggcctgagctactgcgcccaacccatttatttattnctgttttagttgcatttgctttaggagtcttagccatgaattctttgcctaggccaatgtccagaggagtttctcctaggttatattctagaatttttatggtttcaggtcttaggtttaagtcttttatccatcttgagtttatttttgtgtaaagtgagagacagggattcagtttcattcttctacatgtggctatccagttttcccagcaccatttattaaataggggtgtccttgcctcaatttatggttt

SEQ ID NO: 566 - DNA, 691 bp, Homo sapiens
  Genbank Accession No. S45630
gacccctcacactcacctagccaccatggacatcgccatccaccacccctggatccgccgccccttctttcctttccactcccccagccgcctctttgaccagttcttcggagagcacctgttggagtctgatcttttcccgacgtctacttccctgagtcccttctaccttcggccaccctccttcctgcgggcacccagctggtttgacactggactctcagagatgcgcctggagaaggacaggttctctgtcaacctggatgtgaagcacttctccccagaggaactcaaagttaaggtgttgggagatgtgattgaggtgcatggaaaacatgaagagcgccaggatgaacatggtttcatctccagggagttccacaggaaataccggatcccagctgatgtagaccctctcaccattacttcatccctgtcatctgatggggtcctcactgtgaatggaccaaggaaacaggtctctggccctgagcgcaccattcccatcacccgtgaagagaagcctgctgtcaccgcagcccccaagaaatagatgccctttcttgaattgcattttttaaaacaagaaagtttccccaccagtgaatgaaagtcttgtgactagtgctgaagcttattaatgctaagggcaggcccaaattatcaagctaataaaatatcattcagcaac

SEQ ID NO: 567 - DNA, 1398 bp, Homo sapiens
  Genbank Accession No. S59049
tagatggcaacctccctatctgcccgcaggtcatagaggcgacacgtagcgtcatctgaccctgaagcaaaggcatctccactccaaagttagacaaaatgccaggaatgttcttctctgctaacccaaaggaattgaaaggaaccactcattcacttctagacgacaaaatgcaaaaaaggaggccaaagacttttggaatggatatgaaagcatacctgagatctatgatcccacatctggaatctggaatgaaatcttccaagtccaaggatgtactttctgctgctgaagtaatgcaatggtctcaatctctggaaaaacttcttgccaaccaaactggtcaaaatgtctttggaagtttcctaaagtctgaattcagtgaggagaatattgagttctggctggcttgtgaagactataagaaaacagagtctgatcttttgccctgtaaagcagaagagatatataaagcatttgtgcattcagatgctgctaaacaaatcaatattgacttccgcactcgagaatctacagccaagaagattaaagcaccaacccccacgtgttttgatgaagcacaaaaagtcatatatactcttatggaaaaggactcttatcccaggttcctcaaatcagatatttacttaaatcttctaaatgacctgcaggctaatagcctaaagtgactggtccctggctgaagggaattaacagatagtatcaaggcacgaaggaatgtgccagtatggctccctgggtgaacagcttggccttttttgggtgtcttgacaggccaagaagaacaaatgactcagaatggattaacatgaaagttatccaggcgcagagttgaagaagcataagcaagacaaaaacagagagaccgcagaaggaggaagatactgtggtactgtcataaaaaacagtggagctctgtattagaaagcccctcagaactgggaaggccaggtaactctagttacacagaaactgtgactaaagtctatgaaactgattacaacaggctgtaagaatcaaagtcaactgacatctatgctacatattattatatagtttgtactgagctattgaagtcccattaacttaaagtatatgttttcaaattgccattgctactattgcttgtcggtgtattttattttattgtttttgactttggaagagatgaactgtgtatttaacttaagctattgctcttaaaaccagggatcagaatatatttgtaagttaaatcattggtgctaataataaatgtggattttgtattaaaatatatagaagcaatttctgtttacatgtccttgctacttttaaaaacttgcatttattcctcagattttaaaaataaataaataattcatttaaaaaaaaaaa

SEQ ID NO: 568 - DNA, 1223 bp, Homo sapiens
  Genbank Accession No. S81914
acactcgctcggctcaccatgtgtcactctcgcagctgccacccgaccatgaccatcctgcaggccccgaccccggccccctccaccatcccgggaccccggcggggctccggtcctgagatcttcaccttcgaccctctcccggagcccgcagcggcccctgccgggcgccccagcggctctcgcgggcaccgaaagcgcagccgcagggttctctaccctcgagtggtccggcgccagctgccagtcgaggaaccgaacccagccaaaaggcttctctttctgctgctcaccatcgtcttctgccagatcctgatggctgaagagggtgtgcgggcgcccctgcctccagaggacgcccctaacgccgcatccctggcgcccacccctgtgtcccccgtcctcgagccctttaatctgacttcggagccctcggactacgctctggacctcagcactttcctccagcaacacccggccgccttctaactgtgactccccgcactccccaaaaagaatccgaaaaaccacaaagaaacaccaggcgtacctggtgcgcgagagcgtatccccaactgggacttccgaggcaacttgaactcagaacactacagcggagacgccacccggtgcttgaggcgggaccgaggcgcacagagaccgaggcgcatagagaccgagcacagcccagctgggctaggcccggtgggaaggagagcgtcgttaatttatttcttattgctcctaattaatatttatatgtatttatgtacgtcctcctaggtgatgagatgtgtacgtaatatttattttaacttatgcaagggtgtgagatgttccccctgctgtaaatgcaggtctcttggtatttattgagctttgtgggactggtggaagcaggacacctggaactgcggcaaagtaggagaagaaatggggaggactcgggtgggggaggacgtcccggctgggatgaagtctggtggtgggtcgtaagtttaggaggtgactgcatcctccagcattctcaactccgtctgtctactgtgtgagacttcggcggaccattaggaatgagatccgtgagatccttccatcttcttgaagtcgcctttagggtggctgcgaggtagagggttgggggttggtgggctgtcacggagcgactgtcgagatcgcctagtatgttctgtgaacacaaataaaattgatttactgtctgc

SEQ ID NO: 569 - DNA, 290 bp, Homo sapiens
  Genbank Accession No. T03229
ggtgatctttgtggcattctctgtatttcctgaatctgaatgttgtcctgccttgctagattggggaagttctcctggataatatcctgcagagtgttttccagctcggttccattctgcccatcactttcaggtacaccaatcagacgtagatttggtcttctctcatagtcccatatttcttggaggctttattcgtttcttgttatccttttttcctctaaaacttttccttctcacttcaatttcaatttaatttcaaccttcaaatcaactgatacccctttctt

SEQ ID NO: 570 - DNA, 253 bp, Homo sapiens
  Genbank Accession No. T03593
  unsure (1)..(253): n = a or c or g or t
cgngcaaaagtgtttatttttctccttcagatatacantctattggggnttccgtgccactgaccaccatgtacaaggaagggnttcacaggcaagggggacaggtgagggcagcccccacttcactcaaggaacagggcaagggggcccagtacagagaacagaaatctcttacgacagcatcgtgccctggcagangattctgcatantcacctagaaatttcaattctaactgntttgatggaataatag

SEQ ID NO: 571 - DNA, 71 bp, Homo sapiens
  Genbank Accession No. T10695
tttttttttcagctgggctacaggtttattctggcactggaggtgaaagggggctggtgtggccagcaccg

SEQ ID NO: 572 - DNA, 255 bp, Homo sapiens
  Genbank Accession No. T15409
  unsure (1)..(255): n = a or c or g or t
ttttattgaaagttgaaaagtgaacagttaaataagtgacaccttaaaattgtgtagcgaaatgacagaaaatatgcatataactactatacaggtgctatgcagaaacccctactgggaaatccatttnattngttcgaactgcggatttttnaacgtattcaaccagctgaattgaacgatttcagtgnacacggatttactttagcgtattcagcagctagatttcagcttccacanngtgcgtnactgtgc

SEQ ID NO: 573 - DNA, 268 bp, Homo sapiens
  Genbank Accession No. T15423
  unsure (1)..(268): n = a or c or g or t
tttatttcattatcagtcttacaggttgctgaggttgggcaaagccagggtagtaacttaaatccaaagcacttttgtggagggacaacccgtttagcaaggccctgttactgaacagagggcagtggggggcaccccagggaccacagcacacagactagtgttagaaaccccttcccagaagcaaccggtgggacttggcccttaccagccaggggtctactccattgggtcttggggcccaccaacccctnttagaggnggnccc

SEQ ID NO: 574 - DNA, 246 bp, Homo sapiens
  Genbank Accession No. T15850
  unsure (1)..(246): n = a or c or g or t
aggaggggtgcgtttattagacaaacgctgggagacaggcctggtggggacctggctgggggatgatgcagcccgcaatggctgctgcttcgtacttggcttgccccggaccacagactcgtaacggtaacccctaacttttcaggggcctggnacccgcccctgccagggtccacacgcagagttatggcgggnccacccccacaggtgcagctctatctcccacctnttgcacagagatataag

SEQ ID NO: 575 - DNA, 311 bp, Homo sapiens
  Genbank Accession No. T16282
  unsure (1)..(311): n = a or c or g or t
aagctcagagtgacttttaatatgccaatcaatgttaataaaacacaagtcaaagacaagtgcaaacatgttttagaccaaaattaatgagaaaacagacaatttttttcaacatctgttagccagtattattagtcaaatggctaatcacagataaaatatattttgtgaaaaacttggaatgtcagangtcattctggcatttcaaacagctatgtacagtatcacgaagatcggtttatatacacaaatattgaagagaaaaaccgggcaaaacatttaaaaacagactaataatacaatcaagtata

SEQ ID NO: 576 - DNA, 250 bp, Homo sapiens
  Genbank Accession No. T17428
  unsure (1)..(250): n = a or c or g or t
gctgtgcagtagtatttattgttacagtgttaaaattcactctcggggaagcgatttggggccacggccctagaaactgcatctttgttcagagccaacccatttcctctgcagccacaaaatgcctttgtgtntcagggctcgggagattctcctcgntggccagccattggcaagaatgccagactcagaggttgccattgcccacaggctttntnctcctttcctttcacagcaggaagagccctcc

SEQ ID NO: 577 - DNA, 309 bp, Homo sapiens
  Genbank Accession No. T23468
tttgccaattatctccatgtttatttaaatatttggctctaaaggaagcaatcattcctttatacttctttaaatttagtattgacatttttattttgggaaaggaggtcttttttttttttaacatggatacaggaaaagaaaactctccaataaaaatattgtctaaaaagtttgttttggctgcatgatttactaaatatgtacaatttcaattcacagcgaaggtaacaaagatttaaacagccaacatcacaaatgtctcaagttctaaaaaaaaatcactgtgcacagtttaacaatttaatt

SEQ ID NO: 578 - DNA, 299 bp, Homo sapiens
  Genbank Accession No. T23490
  unsure (1)..(299): n = a or c or g or t
tttccaggttgacaggttttattccacccccttccatccccatggccaccccaggcaggaggagacaggtgtgctggagtctggtcactttggggcccggcgtgggcagagcccactgggtttacattctctgtgggcaggtgtggacaccagagggctggggcaggaggagcgtgggagcgagcggncgacccccgtctctggcccggcccctgggtaaacgccgactcagatgcctgaaacagacctgggccgagcaaggaaggttgatggtatttccacccagacagaaattcaaa

SEQ ID NO: 579 - DNA, 299 bp, Homo sapiens
  Genbank Accession No. T23622
tttatagaggagactgaaaaagataatttattccatcagaggcatcacaattacagattacagacatttgcaagtaaataatatgcagggttagagcgctgcgttttaacatttaacattcatgagtaaacagagatggccggtgggtaaatatcttgccaaggtggttccttgtattaagccttttgagtctaagatgacaaatccctaggggtcaggtggtttttcccgcacgaactcttgtcaatgagaaatccctcagccccttttgtcttgggtctcacagctccagaaggtga

SEQ ID NO: 580 - DNA, 309 bp, Homo sapiens
  Genbank Accession No. T23935
tttatgtataaacaggtaccagttttgattttatttaatcatttcatacattaacatacatgacacatcaaaatgagaaatgcacagtttaaccgttcaacagctggccttacttcaaaagaacactatattcatattaaacatttacagtctttccatctaactttacacatgtcctaaatcattttccagcacttctcacatagaagtctagttttgctctttaaaatcaccatctgtatcacccctagtagacgcgagggtttccccaattacatgctgaagagagccagccaccaccccacctaa

SEQ ID NO: 581 - DNA, 128 bp, Homo sapiens
  Genbank Accession No. T25732
  unsure (1)..(128): n = a or c or g or t
ctggcttttcctttcttcttatttttattgctcccaaatgtccactcatcgtcactgtcagacgtctccgagtctgacgaggctgcaggctgactcacaggcnnctccttcnnctcagagtcactgcg

SEQ ID NO: 582 - DNA, 207 bp, Homo sapiens
  Genbank Accession No. T32113
  unsure (1)..(207): n = a or c or g or t
ctggacagcgggcagcaccaggcggcggacagtgtcttccttctgcaggagcagcgcgnggctctccaccacctcctctccatccttggtccagcgcacctntgcccagggccggcatagctcacaggtcagcaccacacgctccaggcgcacggctgccacatacaccttgccgctgggatacacgatccacgaggagacgtctgt

SEQ ID NO: 583 - DNA, 308 bp, Homo sapiens
  Genbank Accession No. T33263
  unsure (1)..(308): n = a or c or g or t
gttcctttaaaggtttatttctggcaaataaaaaaaaataacttatgtggttagataaattaatgtatgtnattagatacgacacagggcagagctgaacgttcctgttttcttctggntcttgaaggttggtgagaggccgctgaatgagacccagcctcgtgttttgtgggatgaagagatgcagacaaagtgactcaggtacactgatgctccctggagggctgggaggtgggctcagaggaagaggccgaatccaaaccttttttattgaaaagaaatagctcttgtttgtagcatttaaaaga

SEQ ID NO: 584 - DNA, 271 bp, Homo sapiens
  Genbank Accession No. T40895
taatggtagctatcaatttattaactggttactgcggcaatatatataattataaaatcaccatcaatcctttcattcatacgttaacacatatcactggtttaattcattgaaggcaaatacaagtttttcccttactttccttccaagattccacttaggctggttaccccaaacgtaatggagaaacattaaatgtcacttttaaaccacttttaaaccagtctttaattttcaattcaggtgtgaggcacatatatacacacaaaca

SEQ ID NO: 585 - DNA, 343 bp, Homo sapiens
  Genbank Accession No. T40995
taatggttaaggaggaaggtttattggcttcaattccccagttgatgttcaacactttatttagttctcatttggattttaaacatttgcttgacaaataatttcccatcaatttccatttctttggaaagctcccacgtgtaatttatttttaacatctctgaagagcagaattaatgatatttcctagctgttgctccagatcatgtagggtagaggaggctgaaaactgctacaagggaaggcatctgtattgtttcaaaacgtcaggacggtacgggatactctttccagagcgacgagggtcaaatcccttcatttatttttttcaaaagggtaaaac

SEQ ID NO: 586 - DNA, 351 bp, Homo sapiens
  Genbank Accession No. T49061
  unsure (1)..(351): n = a or c or g or t
ggaccaaagaactttatatttattttaaatatcaaagtaacacaaagaactagttcaatatacagtacacttcctactcttcacagagaactgaaattttctataaagacatttatacttaggaaacatcagacaaccaaagtatgtataaaactcacaagatattttacacacagttcacaataattaattctgatattttaggntttttctgtcattgcttttaaagcatccttaatttaaaaacaaaaattattatttgaggactggaaaacaggtggcaaaggcatttctacttttaattatacactggtaaatccccccttaatccaaaacattttacttncacat

SEQ ID NO: 587 - DNA, 423 bp, Homo sapiens
  Genbank Accession No. T49602
  unsure (1)..(423): n = a or c or g or t
tgaatattcaagaaaggtgaagtttaatttgcatataggcataacctacacctcacttggcaagtgttaggccacagcacaaacccctctgtccaatcacaaatgtccacaaatttgcaaagtaactggacacgaacgatatgcttctcaaactcacacacatattcgtccatcacacacacactcaaatgataaagaantacattgaaatcctctacaaaagagatctgaggacagtantcagatgacctcatgtgcggacagcctnttgcagtttacagtctaatccatttggtcctcacantagccctgtgaggataagcagcacagggattactnttcacaccgttttgcaggatgagggaaactgaggctcaggggatgtgtaaacaccagcctaaggttttccagttgggagactgg

SEQ ID NO: 588 - DNA, 309 bp, Homo sapiens
  Genbank Accession No. T53590
  unsure (1)..(309): n = a or c or g or t
ttnggtatgtggttcagctntttattntctccatggggtgggtgaagaggagtggcccagctgagctgaggaaggtgaccactgagaacccattcaacctgctgagcagcttgggcagaaaggagcaggacttgggacagacgactgaagatgcagagaccccatgggccccacccctgggccttcctcccatntggctgcaggcatcctntntnatcantgctgggttgcttcctggttaaagggccanaaggtnaaggagatgggnttttcangcatcagaatgaggttnaatttggtgcccacatc

SEQ ID NO: 589 - DNA, 470 bp, Homo sapiens
  Genbank Accession No. T56281
  unsure (1)..(470): n = a or c or g or t
caggtntatnttntttaattatcactcacatatttcacaggaaaaggantntagcaaatgggtcaaggtggtntaaaaaaaaaatccaggtttntacatgtctctctgtttacatctgggagaaaggttntcctggcatcagtcgcagcagctgcacttctctgacgcccctttgcaaacacagccctgggcacacttgctacagcccacggggaggcaggagcagcagctnttnttgcaggagggtgcatttgcnctctttgcacttgcagggaaccagcgcagggtgcagggagacaccagcgggcgcagggagcagttggggggncccattgcaagcccgagggagagactgggacttttcccaaggagagaagcgaaggaagccagtggggggcagctcgtgcccganttccttcagccccggggggntccccctagttctaggagcggnccccaccgggtgggat

SEQ ID NO: 590 - DNA, 439 bp, Homo sapiens
  Genbank Accession No. T62857
  unsure (1)..(439): n = a or c or g or t
caatctnaaaaaaatattttcattatgtttattataaaaatataaatgtttccactacaaatcattttacattagtaagaggccatctacattgtacaacataaactgagtaatattttgaaaagacaagtttaaagtaaacacatattgccaatcatatcacatttatacatggcttgattgatatttagcacagcataaactgagtgagttaccagaaataaataatatatgtaaatcaaatttaagatacaaaacagntcatatgggtacataacatcatgtagggagttgtggcctttatgtttactgaaagtcaatgcagttccctgtaccaaagggatggccgtaggcattctaggtaccctctnctccctgggttagggaatccgtacacttatggtttaccatatggtccgggggtaggganttgtggtaa

SEQ ID NO: 591 - DNA, 450 bp, Homo sapiens
  Genbank Accession No. T62873
  unsure (1)..(450): n = a or c or g or t
tttttnacgagacagagctcagttctgtcgcccagactggaatgcagtggtatgatcttggctcactgcagcctcgacttctcgggtacaagcaattctcccacctcagcccctggngtagctgggactacaggagtataccaccatgcccaactcgtttttatatttttatagaaatggtntctcaccatattacccaggctggtctcaaactcctgggctcaagcgatccatctgcctgccttggtctcccaaagtgctgggnttacaggtgtgatcctctgagtctggccaatttttatttaaagatattttttaaattggactggacgcggtggctcatgcctggtaattaatcccagcaactttggggaggccaaggcgggatggctttagaccagcctggggtaacatgggcaagaccccntctctaaaaaaccaaaanaaggg

SEQ ID NO: 592 - DNA, 237 bp, Homo sapiens
  Genbank Accession No. T62918
  unsure (1)..(237): n = a or c or g or t
tttttttaagaatcttctgggcctctttattaagagccctctgccttnccaggggagggaagcaaatccttcagggcccccagagttcctgcaccccatatcatgggtgagnctaccagccacagagccacccgtcaccgtggagaggcttaagntgcactcagagctccccccgggcatgccgaatgtagtgttgatgcagccctgcttcctgagcaaagtcctgaccgcactctg

SEQ ID NO: 593 - DNA, 301 bp, Homo sapiens
  Genbank Accession No. T64211
  unsure (1)..(301): n = a or c or g or t
ttttttnntttgtggattttccttttaatgcaaaatgttgcaatacaaaacaatgtggagaaagcctgttcctcaggcactgaagggaggagtgaggaagagaggacagagctggacgtctcctcctatttctccctccccaagtcactctgaggggaagaacactgctgcctgctccctgggcctgccgcatacaaggttagagccctgggtctggggcatccttagcctgaaatttgttgacatggggcaggagagcaggagggaacattgagggttttgactcttcgggctctaaaag

SEQ ID NO: 594 - DNA, 290 bp, Homo sapiens
  Genbank Accession No. T64223
  unsure (1)..(290): n = a or c or g or t
gaatttnanagcattaagtgcattttattttattgtattagcacataaattgatgaagccacatggtgaaaatctgtgagaaactgaaggttttcatttgttttctgtgccccactgtatatcacctttcaaaataatgctttctgctgggtccaaacttcacttggagcaaagaaaggtagttaaaaggtttcacttaaagctacttcgttatgggtgctactgaaagtaaggtaaaagcaaacagcagtaacatggggactttaantgaggcaagagaagggattcag

SEQ ID NO: 595 - DNA, 445 bp, Homo sapiens
  Genbank Accession No. T67053
  unsure (1)..(445): n = a or c or g or t
ttctggttgtcaatgaggatatttattggggtttcatgagtgcagggagaagggctggatgacttgggatggggagagagacccctcccctgggatccctgcagctccagggtnccgtgggtngggttagagttgggaacctatgaacattctntaggggccactntcttctccacggtgctcccttcatgcgtgacctggcanctntagcttctgtgggacttccactgctcgggcgtcaggctcaggtagctgctggccgcgtacttnttgttgctctgtttggagggtttggtggtctccactcccnccttnacggggctgccatctgccttccagggcactntcacagctcccgggtagaagtcactgatcagacacactagtgtggccttgttggcttggagctcctcagagganggcgggaacagagttacagtgggga

SEQ ID NO: 596 - DNA, 444 bp, Homo sapiens
  Genbank Accession No. T67105
  unsure (1)..(444): n = a or c or g or t
ttancaaacatttattgattgcacaatgaaacaatctctcctttcagatatatacatcagtttactaaaagagtagatacaaaggtcaggaagtaattacaatgcaatgtgataagtttaataatataggtttgacagcatacagnggagggggtgattgggtttnaggtgatggtgggatattggccaggtaatatttcatggaccaagtgatgacaacatagggtttcacagatggataagagtcttccaagtntaccagggggaaatatacatgtgtgggtgccaaaacagagtatggcatttcctganagtcagannttnatacaagagtataaagtncaagagaatgggataagtagctagggaggtaaggccagacaggntaggcnagtcctaggggcctttcaggccatgggnagganaacgtggggcttcacccta

SEQ ID NO: 597 - DNA, 244 bp, Homo sapiens
  Genbank Accession No. T68873
  unsure (1)..(244): n = a or c or g or t
ntttttttttttttcaagtcaaaactgttttattgtcngtttacatatttaatagaaaaaggaatgtagcaaatgctcagggttgtatgaaaaaaaaatccaggtttgtgcaggttgctctgtttacatctgggagcagggctgtccccacatcaggcacagcagctgcacttctccgacgcccctttgcagacgcagccctgggacacttggcacagccatggnagaccaggagcagcagctc

SEQ ID NO: 598 - DNA, 346 bp, Homo sapiens
  Genbank Accession No. T73433
  unsure (1)..(346): n = a or c or g or t
gggagaaataaccagctattgttccgcattcaaacagaaattcaggtgcttgcatctttcacgtattgttcaaaaatcacaagcatctgtggaaaaaaactaaggtattacagacactacacggaggtcatgttcttacattcaagacactaaatacaaaccgangcantgcaaaattgtatactttaattttaaaacccantttttgttctcaacttgaaaagggnaacacttttttgtttcacaaacaagctgggtcgggttggganttctttttgggaacagtaggtcccgcgctaaacactgggttcttgcctccccacccccnttctctaaaatnaaccca

SEQ ID NO: 599 - DNA, 475 bp, Homo sapiens
  Genbank Accession No. T78398
  unsure (1)..(475): n = a or c or g or t
agtattgggtgtagttttatctgtcctttttttattcctttaatttaaaaaaaaaaaacctttaaactaggcaaaattactttccttttaacaaaaaccacattttcatgccttctgataacttttcttaaaccaaaaacatgtcctacttcccttatacactttcgatggagaattttttctcttgtatttagtaatttcaattatatacatttattacaatgttaacttttaggtaactcttatttttaggtgaaaaaccttgggagggtaggccgttttaattatggtaccaggatggcaaaggtccaggaacaaggggaccaagcgggggaggctgggcctagggtcataggccttaaaaactttaaatcttaagggataaaggggnggggggnacggtggggcctcacggnctggttaatcccggtgggttgggggaggggcgagtgggggtggggntcacngggggtca

SEQ ID NO: 600 - DNA, 445 bp, Homo sapiens
  Genbank Accession No. T79768
  unsure (1)..(445): n = a or c or g or t
ttttaagacaactacaaactttcaatattggaggtagctgcagagatcatggtaactgactttttcacagatgaggaatttaaggcccagaggaaggtaatatcagaattagtgacctccgcacccagcacacacacaggacaggggaaagggtgggagagatgcatgcactgggaccctgggatagattcaagatacccttgctgggggagggtggggctggccgttagttctaactcagtcttctcagtgccacctccagcccctgtgggtctttatgggggcccaactctttatccatctttccttggggtgatgggagggcatgttcgccagcattaaggatcttcccagncacaggatggcacggccccgggccttctttgatattattaggtgggcttctgggggntttcttccctgccgnccttccacaactcagggc

SEQ ID NO: 601 - DNA, 408 bp, Homo sapiens
  Genbank Accession No. T85532
  unsure (1)..(408): n = a or c or g or t
atcgcttgaggccacgagttcaagatgaggttggcaacatagtaagacctcatcactacaatttttttttttttaaattagtgaagtgtggtactgcacacccgaagtcccagctacttgggaggctgaggcaggaggattgcttaagcccagaaatttgaggctgcagtgagccatgattgcaccactatgctccagagtctaggcaacagagtgagaccttatctctttaaaacaaacaagaatgaagttaggtatctgtttatttgtttgagccatttgtatttccttttttgtaggactgtcctgtttnaaacgttaaaatcactgctgtnggttttngatttttacatctcagctgggatgggcaccaattaaattatttnaggccctggtttattgnaaaat

SEQ ID NO: 602 - DNA, 459 bp, Homo sapiens
  Genbank Accession No. T86148
  unsure (1)..(459): n = a or c or g or t
atttttatatgaaggttttctggtgaaatcttttaagcagggaggaaaatccaataaatttttttaaaaaggtttagctattccccaatgctatttaatacaattgaggttaggacgttaagtcttatcagactgtgtactggagccccgtgtcatcagcaaaagccgtgtgagtcaacaggtgtgaagactcaagatgcgcacacagacgctgtccgtggttttatggggaatgatgagggctggtcagttctcctcatgacaaaagtcaaaccgacttccctgtgttgcgtgtgaagcttgttagtggacagaggaggaaacgcagggttctgccctggggagnatgacagnccacagcgcttggggtnccgtcagggctttcgtgtncagttagcgtttcacaaactngaggaggagtattaaaanagcccaaaccccaaagtttctttttttcaa

SEQ ID NO: 603 - DNA, 357 bp, Homo sapiens
  Genbank Accession No. T89160
  unsure (1)..(357): n = a or c or g or t
atgctgctatgacagaatacccaagactgagtaatttataaagaaaagtaatttatttctacagtgccagggtctgggaaggtgctggtatctggtgagggctttcttgctgcatcattccatggcagaaagtgagagggtgagagagggacaagggaggggaactgaactcattcctttatcagtaacccactcctgcaataactaatccactcccacaataacaacattaatctattcatgagggcagagctntcatgacctagtcacttcttaaaggttctaccttaactccattgctttgggggattaaatttcaacatattaaacccttgggagggacacattccaaaccac

SEQ ID NO: 604 - DNA, 494 bp, Homo sapiens
  Genbank Accession No. T89703
  unsure (1)..(494): n = a or c or g or t
gtagaaaacaaaaatggaacatttattngcaactcaaatactacgcatatacagtaagaanttaaatataaacacagcaagttccaccccagtcctatttgtccaaggctgcatggtcaaatggaatcttgaagagaacacctggncaacagagcanctntcagcgacgtctccggtctggacttctgctgcgtcttcggccacctctccncttgccttttggtggaccccgaacaaaacaccagtcaacggtgatgggctgtcccatcaaatcctgggccattgagtccctccatagcagcctggggcttccttgtatgtttcatattcagctaggagtatacccctgtcagatatcctgttcgcctgtcgaggttgaggatgaatgtttttaatttccccatattctgcggaatttgtcgtgtatgtnttctgcggnaggcttcctcatggacttccagttacaaagagantccagncttcagcagagcgtt

SEQ ID NO: 605 - DNA, 391 bp, Homo sapiens
  Genbank Accession No. T90190
  unsure (1)..(391): n = a or c or g or t
tantnntccagctcttttattgagatcagtggtggctctgaaaagcgtntttngggttttagaagtaggcgttcgctaatttcttcttgggcgccgcttcttaggcttgacaaccttgggcttagcggccttggnttcacagccttagcagcacttttggcagctttcttgggcttcgcaaccttggccttctttgggctcttagcactttcttggttacagtggccgcggcggctntcttcgctttcttcggngttttcttagcgctcttcttcggagttgcgccgccagccgcccttcttgggcttcttggctnccccaactggcttcttaggtttgggtccgcccgccttttnaaccntggggcttggncttccccggagcttgcctt

SEQ ID NO: 606 - DNA, 483 bp, Homo sapiens
  Genbank Accession No. T90619
  unsure (1)..(483): n = a or c or g or t
gannntnntgggctcggcgtggtggtgaagctgtagcctcgctcagtgaggatctncatgaggtagtcggtcaggtcccggccagccaggnccagacgcaggatggcgtgggggagggcgtcggtacgaatgggcaccgtgtgggtgaccccgtctccagagtccatgacaatgccagtggtgcgcccagaggtangagggacagcacggcctggatggcacgtacatggccggggtgttgaaggtctcaaacataatctgagtcatcttctctctgttggccttggggttcaggggggcctcggtcagcagcactgggtcttcctccggggccacgcgcanttcgtttgtagaaggtgtnggtgccagatctttctccatgtccgtcccagtttggtgacgatgccatgcttcaatggggtantttcagggtcaggatgccangtttgctcttgggccttcgttcgccacgtagggaattct

SEQ ID NO: 607 - DNA, 233 bp, Homo sapiens
  Genbank Accession No. T90889
  unsure (1)..(224): n = a or c or g or t
natgaacagtatataatctaatctctttaattttatgtacatgaatataatgtatgtcaactttgtacatgagatacatatagtatttaaacattttactcaacaaacaagaatttacaatagcaatataactgactagagggctatcaacttaataatacttagattagatctgtactttaataggaaaagaatttaatagtttacaatcatagaaacactgacatttaaaa

SEQ ID NO: 608 - DNA, 305 bp, Homo sapiens
  Genbank Accession No. T94447
  unsure (1)..(305): n = a or c or g or t
ttaattatngatattccccctcaccgccctcagggancgggagaagtcacacgaccatagggagcttggacttggtggtcgtcacggtgctggcagacgagggtctttccaggaaccccttgctagaatcagccctcatacaagtgtgctcagagatcccaggagcgatggcatcctcccgaagtcactacccccatatgtctccttgggcttcttccccctctctttctggaacctgaccaggcagaacgcagcaactgncagcaacagcacgcccagggagcaccccaatcagagntccggcc

SEQ ID NO: 609 - DNA, 302 bp, Homo sapiens
  Genbank Accession No. T95005
ctttattgaaaacattgagtgcagaaataaaccctgctcatgaatgggaaaattcaattttacacaggtgctgattttatccagactgatctatagattcagctgggttccattctacatctcaaggggtttttggggggaatttgacaagctgattctcaaggttacatggaagagcaagggccgagactagagtttaggagatgattcccaaaggcacaggggcagaaaaatgaccagtggaaccacatagaaaaatcaattattgtattttcaatggatcactaggcagcagggaaaag

SEQ ID NO: 610 - DNA, 352 bp, Homo sapiens
  Genbank Accession No. T96171
  unsure (1)..(352): n = a or c or g or t
tgccatgttggcaggctagtctcgaactcctagcctcaagtgatccacctaccttggcttcccaaagtcctgggattataggcatgagcactgtgcccagcccatagatggcttttattaccttaaggtatgtcatgagtaaccttttaattctccataaaattaattattgtgttttttgtttgcttggttttctatgaccctatcataaattcaactccaaactctgcaccaattttttttaaactttactcaagaatttagggccacataaacattccaacaaatttgtcttcgtagggnaaatcttttccagagtttttncccactatggcctaatgcgcagnggtca

SEQ ID NO: 611 - DNA, 358 bp, Homo sapiens
  Genbank Accession No. T97243
  unsure (1)..(358): n = a or c or g or t
nngttatnaagttaaatctctttaatatcccaatacaaagtactgatgcaaaaagacaatgagaaaacccaggaagttggggggtggggggtggggagaggttttataaataaaaaaccccgagcagcttttcagaggcagaggagctaagagaagcagcagtccaaagtgaggaagggagtgtgtggctcctgggacctgccccttgtcccctcactcacagctgctcgtaaacacccctttcaaaaggggctgcaccctttggatatctgcttctttctcttggtccctggggacggcaactagctctggcttcaatcccctacaaaaattcctgagatcttcgggggaccccagc

SEQ ID NO: 612 - DNA, 348 bp, Homo sapiens
  Genbank Accession No. T98019
  unsure (1)..(348): n = a or c or g or t
ataaaatagggctggccanagagcactcaccgtctcccttttgagtttttcccgcttgngtccaattccacgagcagccgagctcgctccaagtcatgccggagccgctgccaggacttgagctgttctttaagggcccagttcttatcctcagaatctctctgtagaggcaaaacgaagatcagaggatgattagaaagccagaggaaaggtcaacagggagaagagagcccagggaaactcaggtcaagccaaaagagggagcacagtaatttatttggtagttgcctcaatctgtgttttccccaaggccttgggaagaattaaattcttttggtattgtntttt

SEQ ID NO: 613 - DNA, 307 bp, Homo sapiens
  Genbank Accession No. T98288
  unsure (1)..(307): n = a or c or g or t
tgagtcattggncttgctctgtcactcaggctgaagtacagagacacaatcatagctcactgctgtcccaacctgctggactcaagtgatcctctctcttcagcctcctgagtagctgaggctactggcatgcacccaccctgataggngttttttattttttagggatggggtcttgctatattgcacaggccagtcttgaaccctggggctcaggcaatccctccacctcagcctcctgagnaattggggactacaggtgtgaaccacggatgcctgcctaattttttttttttttttgagacag

SEQ ID NO: 614 - DNA, 2376 bp, Homo sapiens
  Genbank Accession No. U02020
cgcgcggcccctgtcctccggcccgagatgaatcctgcggcagaagccgagttcaacatcctcctggccaccgactcctacaaggttactcactataaacaatatccacccaacacaagcaaagtttattcctactttgaatgccgtgaaaagaagacagaaaactccaaattaaggaaggtgaaatatgaggaaacagtattttatgggttgcagtacattcttaataagtacttaaaaggtaaagtagtaaccaaagagaaaatccaggaagccaaagatgtctacaaagaacatttccaagatgatgtctttaatgaaaagggatggaactacattcttgagaagtatgatgggcatcttccaatagaaataaaagctgttcctgagggctttgtcattcccagaggaaatgttctcttcacggtggaaaacacagatccagagtgttactggcttacaaattggattgagactattcttgttcagtcctggtatccaatcacagtggccacaaattctagagagcagaagaaaatattggccaaatatttgttagaaacttctggtaacttagatggtctggaatacaagttacatgattttggctacagaggagtctcttcccaagagactgctggcataggagcatctgctcacttggttaacttcaaaggaacagatacagtagcaggacttgctctaattaaaaaatattatggaacgaaagatcctgttccaggctattctgttccagcagcagaacacagtaccataacagcttgggggaaagaccatgaaaaagatgcttttgaacatattgtaacacagttttcatcagtgcctgtatctgtggtcagcgatagctatgacatttataatgcgtgtgagaaaatatggggtgaagatctaagacatttaatagtatcgagaagtacacaggcaccactaataatcagacctgattctggaaaccctcttgacactgtgttaaaggttttggagattttaggtaagaagtttcctgttactgagaactcaaagggttacaagttgctgccaccttatcttagagttattcaaggggatggagtagatattaataccttacaagagattgtagaaggcatgaaacaaaaaatgtggagtattgaaaatattgccttcggttctggtggaggtttgctacagaagttgacaagagatctcttgaattgttccttcaagtgtagctatgttgtaactaatggccttgggattaacgtcttcaaggacccagttgctgatcccaacaaaaggtccaaaaagggccgattatctttacataggacgccagcagggaattttgttacactggaggaaggaaaaggagaccttgaggaatatggtcaggatcttctccatactgtcttcaagaatggcaaggtgacaaaaagctattcatttgatgaaataagaaaaaatgcacagctgaatattgaactggaagcagcacatcattaggctttatgactgggtgtgtgttgtgtgtatgtaatacataatgtttattgtacagatgtgtggggtttgtgttttatgatacattacagccaaattatttgttggtttatggacatactgccctttcattttttttcttttccagtgtttaggtgatctcaaattaggaaatgcatttaaccatgtaaaagatgagtgctaaagtaagctttttagggccctttgccaataggtagtcattcaatctggtattgatcttttcacaaataacagaactgagaaacttttatatataactgatgatcacataaaacagatttgcataaaattaccatgattgctttatgtttatatttaacttgtatttttgtacaaacaagattgtgtaagatatatttgaagtttcagtgatttaacagtctttccaacttttcatgatttttatgagcacagactttcaagaaaatacttgaaaataaattacattgccttttgtccattaatcagcaaataaaacatggccttaacaaagttgtttgtgttattgtacaatttgaaaattatgtcgggacataccctatagaattactaaccttactgccccttgtagaatatgtattaatcattctacattaaagaaaataatggttcttactggaatgtctaggcactgtacagttattatatatcttggttgttgtattgtaccagtgaaatgccaaatttgaaaggcctgtactgcaattttatatgtcagagattgcctgtggctctaatatgcacctcaagattttaaggagataatgtttttagagagaatttctgcttccactatagaatatatacataaatgtaaaatacttacaaaagtgg

SEQ ID NO: 615 - DNA, 5102 bp, Homo sapiens
  Genbank Accession No. U03688
gcttctgcgactccagttgtgagagccgcaagggcatgggaattgacgccactcaccgacccccagtctcaatctcaacgctgtgaggaaacctcgactttgccaggtccccaagggcagcggggctcggcgagcgaggcacccttctccgtccccatcccaatccaagcgctcctggcactgacgacgccaagagactcgagtgggagttaaagcttccagtgagggcagcaggtgtccaggccgggcctgcgggttcctgttgacgtcttgccctaggcaaaggtcccagttccttctcggagccggctgtcccgcgccactggaaaccgcacctccccgcagcatgggcaccagcctcagcccgaacgacccttggccgctaaacccgctgtccatccagcagaccacgctcctgctactcctgtcggtgctggccactgtgcatgtgggccagcggctgctgaggcaacggaggcggcagctccggtccgcgcccccgggcccgtttgcgtggccactgatcggaaacgcggcggcggtgggccaggcggctcacctctcgttcgctcgcctggcgcggcgctacggcgacgttttccagatccgcctgggcagctgccccatagtggtgctgaatggcgagcgcgccatccaccaggccctggtgcagcagggctcggccttcgccgaccggccggccttcgcctccttccgtgtggtgtccggcggccgcagcatggctttcggccactactcggagcactggaaggtgcagcggcgcgcagcccacagcatgatgcgcaacttcttcacgcgccagccgcgcagccgccaagtcctcgagggccacgtgctgagcgaggcgcgcgagctggtggcgctgctggtgcgcggcagcgcggacggcgccttcctcgacccgaggccgctgaccgtcgtggccgtggccaacgtcatgagtgccgtgtgtttcggctgccgctacagccacgacgaccccgagttccgtgagctgctcagccacaacgaagagttcgggcgcacggtgggcgcgggcagcctggtggacgtgatgccctggctgcagtacttccccaacccggtgcgcaccgttttccgcgaattcgagcagctcaaccgcaacttcagcaacttcatcctggacaagttcttgaggcactgcgaaagccttcggcccggggccgccccccgcgacatgatggacgcctttatcctctctgcggaaaagaaggcggccggggactcgcacggtggtggcgcgcggctggatttggagaacgtaccggccactatcactgacatcttcggcgccagccaggacaccctgtccaccgcgctgcagtggctgctcctcctcttcaccaggtatcctgatgtgcagactcgagtgcaggcagaattggatcaggtcgtggggagggaccgtctgccttgtatgggtgaccagcccaacctgccctatgtcctggccttcctttatgaagccatgcgcttctccagctttgtgcctgtcactattcctcatgccaccactgccaacacctctgtcttgggctaccacattcccaaggacactgtggtttttgtcaaccagtggtctgtgaatcatgacccagtgaagtggcctaacccggagaactttgatccagctcgattcttggacaaggatggcctcatcaacaaggacctgaccagcagagtgatgattttttcagtgggcaaaaggcggtgcattggcgaagaactttctaagatgcagctttttctcttcatctccatcctggctcaccagtgcgatttcagggccaacccaaatgagcctgcgaaaatgaatttcagttatggtctaaccattaaacccaagtcatttaaagtcaatgtcactctcagagagtccatggagctccttgatagtgctgtccaaaatttacaagccaaggaaacttgccaataagaagcaagaggcaagctgaaattttagaaatattcacatcttcggagatgaggagtaaaattcagtttttttccagttcctcttttgtgctgcttctcaattagcgtttaaggtgagcataaatcaactgtccatcaggtgaggtgtgctccatacccagcggttcttcatgagtagtgggctatgcaggagcttctgggagatttttttgagtcaaagacttaaagggcccaatgaattattatatacatactgcatcttggttatttctgaaggtagcattctttggagttaaaatgcacatatagacacatacacccaaacacttacaccaaactactgaatgaagaagtattttggtaaccaggccatttttggtgggaatccaagattggtctcccatatgcagaaatagacaaaaagtatattaaacaaagtttcagagtatattgttgaagagacagagacaagtaatttcagtgtaaagtgtgtgattgaaggtgataagggaaaagataaagaccagaaattcccttttcaccttttcaggaaaataacttagactctagtatttatgggtggatttatccttttgccttctggtatacttccttacttttaaggataaatcataaagtcagttgctcaaaaagaaatcaatagttgaattagtgagtatagtggggttccatgagttatcatgaattttaaagtatgcattattaaattgtaaaactccaaggtgatgttgtacctcttttgcttgccaaagtacagaatttgaattatcagcaaagaaaaaaaaaaaagccagccaagctttaaattatgtgaccataatgtactgatttcagtaagtctcataggttaaaaaaaaaagtcaccaaatagtgtgaaatatattacttaactgtccgtaagcagtatattagtattatcttgttcaggaaaaggttgaataatatatgccttgtgtaatattgaaaattgaaaagtacaactaacgcaaccaagtgtgctaaaaatgagcttgattaaatcaaccacctatttttgacatggaaatgaagcagggtttcttttcttcactcaaattttggcgaatctcaaaattagatcctaagatgtgttcttatttttataacatctttattgaaattctatttataatacagaatcttgttttgaaaataacctaattaatatattaaaattccaaattcatggcatgcttaaattttaactaaattttaaagccattctgattattgagttccagttgaagttagtggaaatctgaacattctcctgtggaaggcagagaaatctaagctgtgtctgcccaatgaataatggaaaatgccatgaattacctggatgttctttttacgaggtgacaagagttggggacagaactcccattacaactgaccaagtttctcttctagatgattttttgaaagttaacattaatgcctgctttttggaaagtcagaatcagaagatagtcttggaagctgtttggaaaagacagtggagatgaggtcagttgtgttttttaagatggcaattactttggtagctgggaaagcataaagctcaaatgaaatgtatgcattcacatttagaaaagtgaattgaagtttcaagttttaaagttcattgcaattaaacttccaaagaaagttctacagtgtcctaagtgctaagtgcttattacattttattaagctttttggaatctttgtaccaaaattttaaaaaagggagtttttgatagttgtgtgtatgtgtgtgtggggtggggggatggtaagagaaaagagagaaacactgaaaagaaggaaagatggttaaacattttcccactcattctgaattaattaatttggagcacaaaattcaaagcatggacatttagaagaaagatgtttggcgtagcagagttaaatctcaaataggctattaaaaaagtctacaacatagcagatctgttttgtggtttggaatattaaaaaacttcatgtaattttattttaaaatttcatagctgtacttcttgaatataaaaaatcatgccagtatttttaaaggcattagagtcaactacacaaagcaggcttgcccagtacatttaaattttttggcacttgccattccaaaatattatgccccaccaaggctgagacagtgaatttgggctgctgtagcctatttttttagattgagaaatgtgtagctgcaaaaataatcatgaaccaatctggatgcctcattatgtcaaccaggtccagatgtgctataatctgtttttacgtatgtaggcccagtcgtcatcagatgcttgcggcaaaagaaagctgtgtttatatggaagaaagtaaggtgcttggagtttacctggcttatttaatatgcttataacctagttaaagaaaggaaaagaaaacaaaaaacgaatgaaaataactgaatttggaggctggagtaatcagattactgctttaatcagaaaccctcattgtgtttctaccggagagagaatgtatttgctgacaaccattaaagtcagaagttttactccaggttattgcaataaagtataatgtttattaaatgcttcatttgtatgtcaaagctttgactctataagcaaattgcttttttccaaaacaaaaagatgtctcaggtttgttttgtgaattttctaaaagctttcatgtcccagaacttagcctttacctgtgaagtgttactacagccttaatattttcctagtagatctatattagatcaaatagttgcatagcagtatatgttaatttgtgtgtttttagctgtgacacaactgtgtgattaaaaggtatactttagtagacatttataactcaaggataccttcttatttaatcttttcttatttttgtactttatcatgaatgcttttagtgtgtgcataatagctacagtgcatagttgtagacaaagtacattctggggaaacaacatttatatgtagcctttactgtttgatataccaaattaaaaaaaaattgtatctcattacttatactgggacaccattaccaaaataataaaaatcactttcataatcttgaaaaaa

SEQ ID NO: 616 - DNA, 541 bp, Homo sapiens
  Genbank Accession No. U05861
tagagcagtcagaaaatgaacttcttaacatctacactagcggcagcttcctagaaatcactgcactacccgctagtaacggagtcattgccattcagagtgtgcatttttttttctctttccagttttgctggcccccctaattatccattttctgatgaatattaacatggagggcattgcatgaggtctgccagaaggccctgcgtgtggatggtgacacagaggatggctctatgctggtgactggacacatcgcctctggttaaatctctcctgcttggtgatttcagcaagctacagcaaagcccattggccagaaaggaaagacaataattttgttttttcattttgaaaaaattaaatgctctctcctaaagattcttcacctactttcgtctccataacttctatgttttctttccttctgacacactagtgcccctaaattgtgatttgcctatacgtttagggccggggttggaagatgttaacaaccatttaagattcatttctgcagtgggagtgggtggagtttcag

SEQ ID NO: 617 - DNA, 1987 bp, Homo sapiens
  Genbank Accession No. U06863
gggcggggcgatcggcggagctcccacctccgcttacagctcgctgccgccgtcctgccccgcgcccccaggagacctggaccagaccacgatgtggaaacgctggctcgcgctcgcgctcgcgctggtggcggtcgcctgggtccgcgccgaggaagagctaaggagcaaatccaagatctgtgccaatgtgttttgtggagccggccgggaatgtgcagtcacagagaaaggggaacccacctgtctctgcattgagcaatgcaaacctcacaagaggcctgtgtgtggcagtaatggcaagacctacctcaaccactgtgaactgcatcgagatgcctgcctcactggatccaaaatccaggttgattacgatggacactgcaaagagaagaaatccgtaagtccatctgccagcccagttgtttgctatcagtccaaccgtgatgagctccgacgtcgcatcatccagtggctggaagctgagatcattccagatggctggttctctaaaggcagcaactacagtgaaatcctagacaagtattttaagaactttgataatggtgattctcgcctggactccagtgaattcctgaagtttgtggaacagaatgaaactgccatcaatattacaacgtatccagaccaggagaacaacaagttgcttaggggactctgtgttgatgctctcattgaactgtctgatgaaaatgctgattggaaactcagcttccaagagtttctcaagtgcctcaacccatctttcaaccctcctgagaagaagtgtgccctggaggatgaaacgtatgcagatggagctgagaccgaggtggactgtaaccgctgtgtctgtgcctgtggaaattgggtctgtacagccatgacctgtgacggaaagaatcagaagggggcccagacccagacagaggaggagatgaccagatatgtccaggagctccaaaagcatcaggaaacagctgaaaagaccaagagagtgagcaccaaagagatctaatgaggaggcacagaccagtgtctggatcccagcatcttctccacttcagcgctgagttcagtatacacaagtgtctgctacagtcgccaaatcaccagtatttgcttatatagcaatgagttttattttgtttatttgttttgcaataaaggatatgaaggtggctggctaggaagggaagggccacagccttcatttctaggagtgctttaagagaaactgtaaatggtgctctggggctggaggctagtaaggaaactgcatcacgattgaaagaggaacagacccaaatctgaacctcttttgagtttactgcatctgtcagcaggctgcagggagtgcacacgatgccagagagaacttagcagggtgtccccggaggagaggtttgggaagctccacggagaggaacgctctctgcttccagcctctttccattgccgtcagcatgacagacctccagcatccacgcatctcttggtcccaataactgcctctagatacatagccatactgctagttaacccagtgtccctcagacttggatggagtttctgggagggtacacccaaatgatgcagatacttgtatactttgagccccttagcgacctaaccaaattttaaaaatactttttaccaaaggtgctatttctctgtaaaacactttttttggcaagttgactttattcttcaattattatcattatattattgttttttaatattttattttcttgactaggtattaagcttttgtaattatttttcagtagtcccaccacttcataggtggaaggagtttggggttcttcctggtgcaggggctgaaataacccagatgcccccaccctgccacatactagatgcagcccatagttggcccccctagcttccagcagtccactatctgccagaggagcaagggtgccttagaccgaagccaggggaagaagcatccttgctcccc

SEQ ID NO: 618 - DNA, 952 bp, Homo sapiens
  Genbank Accession No. U08021
tgaactctggatgctgttagcctgagactcaggaagacaacttctgcagggtcactccctggcttctggaggaaagagaaggagggcagtgctccagtggtacagaagtgagacataatggaatcaggcttcacctccaaggacacctatctaagccattttaaccctcgggattacctagaaaaatattacaagtttggttctaggcactctgcagaaagccagattcttaagcaccttctgaaaaatcttttcaagatattctgcctagacggtgtgaagggagacctgctgattgacatcggctctggccccactatctatcagctcctctctgcttgtgaatcctttaaggagatcgtcgtcactgactactcagaccagaacctgcaggagctggagaagtggctgaagaaagagccagaggcctttgactggtccccagtggtgacctatgtgtgtgatcttgaagggaacagagtcaagggtccagagaaggaggagaagttgagacaggcggtcaagcaggtgctgaagtgtgatgtgactcagagccagccactgggggccgtccccttacccccggctgactgcgtgctcagcacactgtgtctggatgccgcctgcccagacctccccacctactgcagggcgctcaggaacctcggcagcctactgaagccagggggcttcctggtgatcatggatgcgctcaagagcagctactacatgattggtgagcagaagttctccagcctccccctgggccgggaggcagtagaggctgctgtgaaagaggctggctacacaatcgaatggtttgaggtgatctcgcaaagttattcttccaccatggccaacaacgaaggacttttctccctggtggcgaggaagctgagcagacccctgtgatgcctgtgacctcaattaaagcaattcctttgacctgtca

SEQ ID NO: 619 - DNA, 2156 bp, Homo sapiens
  Genbank Accession No. U10550
agcgcagcactccccgctcgttggcccgggtatcccagcgcggacccacgcgatacgctgacgccccgacgccgatccggccgagccaagtaagggggacggcccgagacggagaagggagagagtgggagtttcccagcccgcagaactttcgaagttgagaagagaacccctggaacgtgcgctcagcactgggattttctggactcaacgatgactctgaataatgtcaccatgcgccagggcactgtgggcatgcagccacagcagcagcgctggagcatcccagctgatggcaggcatctgatggtccagaaagagccccaccagtacagccaccgcaaccgccattctgctacccctgaggaccactgccgccgaagctggtcctctgactccacagactcagtcatctcctctgagtcagggaacacctactaccgagtggtgctcataggggagcagggggtgggcaagtccactctggccaacatctttgcaggtgtgcatgacagcatggacagcgactgcgaggtgctgggagaagatacatatgaacgaaccctgatggttgatggggaaagtgcaacgattatactcctggatatgtgggaaaataagggggaaaatgaatggctccatgaccactgcatgcaggtcggggacgcatacctgattgtctactcaatcacagaccgagcgagcttcgagaaggcatctgagctgcgaatccagctccgcagggcccggcagacagaggacattcccataattttggttggcaacaaaagtgacttagtgcggtgccgagaagtgtctgtatcagaagggagagcctgtgcagtggtgtttgactgcaagttcatcgagacctctgcagctgtccagcacaacgtgaaggagctgtttgagggcattgtgcgacaggtgcgccttcggcgggacagcaaggagaagaatgaacggcggctggcctaccagaaaaggaaggagagcatgcccaggaaagccaggcgcttctggggcaagatcgtggccaaaaacaacaagaatatggccttcaagctcaagtccaaatcctgccatgacctctctgtactctaggaacccagggtcacccagatgtccctttgatggcccttgttgaaggccattgggaccaataatctatattagattgaatacttaagttagatgtggtttcccccattgtagcagggagctagcgtattagccttgtgggcaacatgatgcatgggaaatgaaagatttttgtaaaaagtcagtatttatttccaggaaaagcctgaccttgctatttgaacacccaagactctttagaggatgtgtttggtgttcacatgtgtttcttctattttggatagtagggaagtaaagcttacaaagaatgcctagaacaagaacttttcatcattaaaaatttttcccagtgttctgatatgtgactttgaggccaatgagtcataaacaaatataagaaagctgtcaatgagtttcttcaaaggagggaaaactttctacgaatctaagatccatggagctagaattgtagaactaggctcatcagaatcgtgactattattgctccatcaaactgtgaaaagaaatgatgtggaccttgctggaaacaaaggcttagcaaacaatttttgttcaatgcccaccgagacatatagaattgggaactgatacatgtgtcccttataggctcaaaaattatatcttacaatttcttatttagggggaaattatttgaatcagattctatttagtcaaaccaccttttatgttttattatttttgaattcatggagccatcataaaaatatttttaaaatcagaattattgataccctgtagtgcaaaatgtcaatttttaatgtataatcagaagtctgaattttcataaaacatatagcataaaaacctccagtactttggttgacccttgtatgtcacagctctgctctatttattattattttgcaaaataaccattttaacatttgataaagcatatttatgaacatatttcttaataagaaaaatatccattttattaccattttctatctttttcaaaatatgcaagtttttacctatatgtcttataataaaagaaataaaatatttga

SEQ ID NO: 620 - DNA, 2244 bp, Homo sapiens
  Genbank Accession No. U19495
gcacgggacaggccgggccacacccaccggggcgagctcggagggcggcgctctgggcggagggcccggcggctcggcccagggcgcgttacctcgtcgccggggccggagagggcgggcggaggcacggggcctggaggcgccaggcggaggatgcgggcgacacggtggcggcggcgaccgcgcgaccgggcgggcgggcgggcaggggcgagcggagggagggagcggactgcggcaggatctgtcgaggaaaaatcttgcggccggcgattccccgccttttaagcgcagcctgcactccccccaccccacgcaggggcgggccttccccaacgcgggcgcccactggccgccgcgcgccgctcccctccagctcgcctgcgcctctcactctccgtcagccgcattgcccgctcggcgtccggcccccgacccgcgctcgtccgcccgcccgcccgcccgcccgcgccatgaacgccaaggtcgtggtcgtgctggtcctcgtgctgaccgcgctctgcctcagcgacgggaagcccgtcagcctgagctacagatgcccatgccgattcttcgaaagccatgttgccagagccaacgtcaagcatctcaaaattctcaacactccaaactgtgcccttcagattgtagcccggctgaagaacaacaacagacaagtgtgcattgacccgaagctaaagtggattcaggagtacctggagaaagctttaaacaagtaagcacaacagccaaaaaggactttccgctagacccactcgaggaaaactaaaaccttgtgagagatgaaagggcaaagacgtgggggagggggccttaaccatgaggaccaggtgtgtgtgtggggtgggcacattgatctgggatcgggcctgaggtttgccagcatttagaccctgcatttatagcatacggtatgatattgcagcttatattcatccatgccctgtacctgtgcacgttggaatttttattactggggtttttctaagaaagaaattgtattatcaacagcattttcaagcagttagttccttcatgatcatcacaatcatcatcattctcattctcattttttaaatcaacgagtacttcaagatctgaatttggcttgtttggagcatctcctctgctcccctggggagtctgggcacagtcaggtggtggcttaacagggagctggaaaaagtgtcctttcttcagacactgaggctcccgcagcagcgcccctcccaagaggaaggcctctgtggcactcagataccgactggggctgggcgccgccactgccttcacctcctctttcaacctcagtgattggctctgtgggctccatgtagaagccactattactgggactgtgctcagagacccctctcccagctattcctactctctccccgactccgagagcatgcattaatcttgcttctgcttctcatttctgtagcctgatcagcgccgcaccagccgggaagagggtgattgctggggctcgtgccctgcatccctctcctcccagggcctgccccacagctcgggccctctgtgagatccgtctttggcctcctccagaatggagctggccctctcctggggatgtgtaatggtccccctgcttacccgcaaaagacaagtctttacagaatcaaatgcaattttaaatctgagagctcgctttgagtgactgggttttgtgattgcctctgaagcctatgtatgccatggaggcactaacaaactctgaggtttccgaaatcagaagcgaaaaaatcagtgaataaaccatcatcttgccactaccccctcctgaagccacagcagggtttcaggttccaatcagaactgttggcaaggtgacatttccatgcataaatgcgatccacagaaggtcctggtggtatttgtaactttttgcaaggcatttttttatatatatttttgtgcacatttttttttacgtttctttagaaaacaaatgtatttcaaaatatatttatagtcgaacaattcatatatttgaagtggagccatatgaatgtcagtagtttatacttctctattatctcaaactactggcaatttgtaaagaaatatatatgatatataaatgtgattgcagcttttcaatgttagccacagtgtattttttcacttgtactaaaattgtatcaaatgtgacattatatgcactagcaataaaatgctaattgtttcatggta

SEQ ID NO: 621 - DNA, 3100 bp, Homo sapiens
  Genbank Accession No. U20350
actcgtctctggtaaagtctgagcaggacagggtggctgactggcagatccagaggttcccttggcagtccacgccaggccttcaccatggatcagttccctgaatcagtgacagaaaactttgagtacgatgatttggctgaggcctgttatattggggacatcgtggtctttgggactgtgttcctgtccatattctactccgtcatctttgccattggcctggtgggaaatttgttggtagtgtttgccctcaccaacagcaagaagcccaagagtgtcaccgacatttacctcctgaacctggccttgtctgatctgctgtttgtagccactttgcccttctggactcactatttgataaatgaaaagggcctccacaatgccatgtgcaaattcactaccgccttcttcttcatcggcttttttggaagcatattcttcatcaccgtcatcagcattgataggtacctggccatcgtcctggccgccaactccatgaacaaccggaccgtgcagcatggcgtcaccatcagcctaggcgtctgggcagcagccattttggtggcagcaccccagttcatgttcacaaagcagaaagaaaatgaatgccttggtgactaccccgaggtcctccaggaaatctggcccgtgctccgcaatgtggaaacaaattttcttggcttcctactccccctgctcattatgagttattgctacttcagaatcatccagacgctgttttcctgcaagaaccacaagaaagccaaagccattaaactgatccttctggtggtcatcgtgtttttcctcttctggacaccctacaacgttatgattttcctggagacgcttaagctctatgacttctttcccagttgtgacatgaggaaggatctgaggctggccctcagtgtgactgagacggttgcatttagccattgttgcctgaatcctctcatctatgcatttgctggggagaagttcagaagatacctttaccacctgtatgggaaatgcctggctgtcctgtgtgggcgctcagtccacgttgatttctcctcatctgaatcacaaaggagcaggcatggaagtgttctgagcagcaattttacttaccacacgagtgatggagatgcattgctccttctctgaagggaatcccaaagccttgtgtctacagagaacctggagttcctgaacctgatgctgactagtgaggaaagatttttgttgttatttcttacaggcacaaaatgatggacccaatgcacacaaaacaaccctagagtgttgttgagaattgtgctcaaaatttgaagaatgaacaaattgaactctttgaatgacaaagagtagacatttctcttactgcaaatgtcatcagaactttttggtttgcagatgacaaaaattcaactcagactagtttagttaaatgagggtggtgaatattgttcatattgtggcacaagcaaaagggtgtctgagccctcaaagtgaggggaaaccagggcctgagccaagctagaattccctctctctgactctcaaatcttttagtcattatagatcccccagactttacatgacacagctttatcaccagagagggactgacacccatgtttctctggccccaagggaaaattcccagggaagtgctctgataggccaagtttgtatcaggtgcccatccctggaaggtgctgttatccatggggaagggatatataagatggaagcttccagtccaatctcatggagaagcagaaatacatatttccaagaagttggatgggtgggtactattctgattacacaaaacaaatgccacacatcacccttaccatgtgcctgatccagcctctcccctgattacaccagcctcgtcttcattaagccctcttccatcatgtccccaaacctgcaagggctccccactgcctactgcatcgagtcaaaactcaaatgcttggcttctcatacgtccaccatggggtcctaccaatagattccccattgcctcctccttcccaaaggactccacccatcctatcagcctgtctcttccatatgacctcatgcatctccacctgctcccaggccagtaagggaaatagaaaaaccctgcccccaaataagaagggatggattccaaccccaactccagtagcttgggacaaatcaagcttcagtttcctggtctgtagaagagggataaggtacctttcacatagagatcatcctttccagcatgaggaactagccaccaactcttgcaggtctcaacccttttgtctgcctcttagacttctgctttccacacctgcactgctgtgctgtgcccaagttgtggtgctgacaaagcttggaagagcctgcaggtgccttggccgcgtgcatagcccagacacagaagaggctggttcttacgatggcacccagtgagcactcccaagtctacagagtgatagccttccgtaacccaactctcctggactgccttgaatatcccctcccagtcaccttgtgcaagcccctgcccatctgggaaaataccccatcattcatgctactgccaacctggggagccagggctatgggagcagcttttttttcccccctagaaacgtttggaacaatgtaaaactttaaagctcgaaaacaattgtaataatgctaaagaaaaagtcatccaatctaaccacatcaatattgtcattcctgtattcacccgtccagaccttgttcacactctcacatgtttagagttgcaatcgtaatgtacagatggttttataatctgatttgttttcctcttaacgttagaccacaaatagtgctcgctttctatgtagtttggtaattatcattttagaagactctaccagactgtgtattcattgaagtcagatgtggtaactgttaaattgctgtgtatctgatagctctttggcagtctatatgtttgtataatgaatgagagaataagtcatgttccttcaagatcatgtaccccaatttacttgccattactcaattgataaacatttaacttgtttccaatgtttagcaaatacatattttatagaacttc

SEQ ID NO: 622 - DNA, 8628 bp, Homo sapiens
  Genbank Accession No. U20734
  unsure (1)..(8628): n = a or c or g or t
ctacacagatagccctacatagacctttgcatccaggctggcacagaagcggcagaggctactcctgtctctcaggcctgggtgtcaggttggaccagcacacactctcacatgcaccctataggccagtcacacgcttgccccctggaccttgccaaggttctgtgggggcactgacaccccagtctgtctctgccccacagagatcctggcacttcctctctccaaacatcacccccacttccctccctctttgcttttgccacttcccctaggagcctagctcacagcctctgctcctgctggggtgggggcctgctataaagaggtcacccagggtcttgtgatgcccagtcccccaaggcttcaccagcagtggcagggatggaagcagcttcctgagaaactcccctcatgcccaaccatgtcagcctggagagagagaaagagagagactctccttcctgcttccaagaaaacctagcagcttctctccaggagaggggcaaaggacccccaaacacagaggtgggagagggaggcggctggtaggcagagttcctgggggactgccgggcctcagatccacacccaggggcagggacacgggagggaggctgggtgctgtgtgctgcgatttgtgggttctcgccctggcctgcccactgctgactcacaggcagcccccagcccagtttcctagtgagggccccactggtcagtggggccagcagggaggggggtcaccgggctatttataagaaggagaagtccctcgtgccaagaccaaaagccccaagacacttgtgggtgggggtgggtgaacttcctccttatcctgtgccctaggccccaggccctggggcactggggaacctgcgcagggacttcttagccaggtgctggtctggccagggcctggcagtacccagctgccagtctggacgctcaggccagttgggggagggggctgttctccaccctcctcgtggggccggcctggccagtggggcggcctggagggggtggtccaggcacaagggtgacactgcagaggcctggaaccgggtataccagcttggcgtnggncccccgccctccctgtctggcccaatctccaccccgtgctcaaacacccatgcagagtgtttgaggaaccctactcccacatgctggcctgtccacagagaccgtgcccctctgtctgtgccccaccacatttctcccccaattaaaggagacctcagtggggtgcggtggctcacacctgtaatcccagactttgggagcaggtggaggattagggcaggacttccagaccagcctaggcaacagaatgagacctgtctcaataaatataaaaaaataaaacttagcagttgtggtgtgcttgtagtcccagttactctggaggctgaggcaggaggatcgcttttacccaggagttcagggctgcagcgagctatgattgtgtagctgaactctagcctgagcaacagagtgagatggtcttgttttgtggccaggctggagtccagtgtcaagatcatggtcatgtgatcctcctggctcagcttcggagtagtggaactacaggacaccctcctgacctcagataatttttaaatttttttgtagagatgggggtcttgctgtgttccccaggctggtctcaaaaatttctgggtagggctgggcgaggtagatcatgcctgtaatcccagactttgggaggtgagggggcagataacttcaggtcaggagttcgagaccggttggcaacatggtgaaaccccatctctactaaaaatacaaaaaattagctggggtggtgggatggcctgtaatcccaactattcgggagggtgaggagaagaataggttgacctgggaggtggaggttgtagtgactaatatttccccttcactccaccctggcgacagatgatattttgtctccaccacccccccaacaataaactcctgggctcaagtgatccctccccctcgccctcccaagtctgagattatagacgtgaccccctgtgtttgccaaagtgagttctctttaaaaaacaaaaaaaggccgggcatgtgcccacgcctgtaatctcagtactttgggagactcaggcggtgatcacaaggtcaggagttcgagaccagctgaccaatatggtgaaatcccgtctgtactaaaaacaaaaattagctgggcatggtggcatgcgcctgtaatcccacctactcaggagtctgagcaggagaatcgttgaacccaggaggcggaggttcagtgaccaacatcatgccattgcactccagcctggcgacagagcaagactccatctccaaaaaacaaacaacaacaaacaacaaaacacccaaaaaaagagcccttcatgagacgccctgcctgcagctggtactgcatacatgctctctggttgtcattattcacaacacagtggctaatgctctgaagaccagacagcttggattatatctcaactctagtgacttctagctgttgacaccagacaagttccttaatctcctgtggctcagtttctcatctgttacatggggatacaaataacatgcattttgctggattgttggaagcagtcgatgacttattttatgttaaccacttagaagagtgcctagcccacagtaagagccatgtaagtgttggctattaaaataataattattatttctcagcctatctatcttaagtgtttctgagtcactgcgtgacactaaccttgaacccatttgtctctctgggcatctctccctgccctgcgcccctgcccccatacacccactgttccttgccctcctcctgggatggactctgtctgggatggcctcacctctctctaggactcccttgcatggccagccagcctggccagggctgaattactgtggcctcctggcttttgggacctgcaagttagcttcccaaggtgctgccctctggcctgccctgccctgcccaaccccccacacgctgccccgtgcgccccgcggggcccagccagatgtcagctgcagttattagcctgggggggagacacaggcctggcagtgtgcctgccagactcacaggctccggaatctcccttgagcctggggagggggaggggagccattcaagcaaggggaagaagggagggggcatttaggggtcacagggaccctccaaggacgggacgcccccagcttctgctgggaccttcctccagcaaggccactgcactgctggacttccccctgcccccacatagctcagtttctttttcgcctctttcgttttccttctctttcccacacttggtgagatctaggctgccccggaatggctgtttaacccctatcccttagcctctttcttaccctaaagaagagagaggctctcttcatcctccagaagacagagctgagctgagagagagagagagagacaaagagagagagagagagacagagacagagacagagacactaggcttctcacctcttggtctagtgggttcacacactaactgctcggaagtcccaccttaagtctaactgaagcctgaccgtctgcacctcgccgcagccttcccgggaaggggctctggttccctcatattctccccttagattttcaggtcttctctgactcggggaggaagctctcagatgacagagctactctagggaaggaggggggctccctctaggtattctggatgatagtaggatgggacctgcagactaaaacgagagtggggcccctgactcacatgagtgagtggggggtgttggggacggagctccagatctcctggcagaagggaaggcaccccacccgagggaggagcagccgccgttccagcccgccgcagggggcgggcatcggcccgccctctccgcgccccgtcggccgggggcgaagtccgacccaggcccgcgggcaggcgggacctgcgggctgggttgggccaggccgggctcgaggacgcagccccaaagcggcggggtggggcggggccgggccaggcggcgtgggggcccgggggcggcggtcggggctggtcgggactagcagtctgggggcccaggcgcgccctgggacctggcagatagtcgggttccccgcttctggctcggggccccaggacagcgctggtcccacctcttcctgtgccctaatatgggcggcggggagagacttcgggggccggcccgcgctcagtcctgcccgcggactcccgctgttgccatggcgaccaggccccgtcctggtggtccctcggccaatggaacactcccaagccgcctgcctccgcggtcccctgcaggcaccgcgggcggaaccattgcttgaggggagaggatggtggctggaggctgccgcggctgggcgggctccaagcacccgggcctccgcgggggctcgcacgcccaggttcctcttccgaggcgcaggatgcgacgggacccagggcggggcgcacggtcccgtagatccgagtgacggagacagggccgggctccttcccccggggctgttgccacacttcctgcctcttctttccccagcctgtttctaaggaagggagtggggttgggcgaccgcacccagccgtcgggctccaggctctaggagcgacacggtgttgggcaaagcagggtcaataggggagggttttaggatgggggacagagaatacagatgactaagaggttaccatcgagggggagcagcagtcgtggaagatccagcagtcctggtgcgcgggaccctcaaggccccctcctcacatgtcaactgagtacctcttattgtcttctctgctccgaagatgtgtcggccccttctaactctctccttcatccgggctagcagatgaccccagtggtccccaatttctggcagacatgtctccatcttctacctggcatattttacctgcctcagtgtaccccaggccgcttactagctttctgcatatctagacttcccctaatgcctccttcccgcttacggagagcctcagactctggactcagctcccatgagctcctggacccctactcatttcttgcaatttaatgggtcatgcagctccacccactcaccccttttgatctctcccctcctccgtcctgtgaaaattccagtcccgcatccttctgagcccgggacccccagtcaattcctgggtcaggtgtctccttaaccctcccgatttacagtgcttaaccctcatttctgctttttggggtctccaatggattgtcagtcctcctacccctctcgtatctgggtacctcaggggtttcttcgcacatactgggaccctcaccccacttgctgcgtaccaggtcctggtatttgtccagtggactccagggaaatcatcctcctcctgaaacccctcactcatgtgcctgggccccccagcacctccttccatgcgtaccccgaggtcctttgagcccctccccctgcagccccgccgagccaccgccccgtggccgctgtttacaaggacacgcgcttcctgacagtgacgcgagccgcctcctccccttccccacgctcgaggaggggggcgcgggggcccggctccggcgacggccaatcggagcgcacttccgtggctgactagcgcggtataaaggcgtgtggctcaggctgagcggctgggaccttgagagcggccaggccagcctcggagccagcagggagctgggagctgggggaaacgacgccaggaaagctatcgcgccagagagggcgacgggggctcgggaagcctgacagggcttttgcgcacagctgccggctggctgctacccgcccgcgccagcccccgagaacgcgcgaccaggcacccagtccggtcaccgcagcggagagctcgccgctcgctgcagcgaggcccggagcggccccgcagggaccctccccagaccgcctgggccgcccggatgtgcactaaaatggaacagcccttctaccacgacgactcatacacagctacgggatacggccgggcccctggtggcctctctctacacgactacaaactcctgaaaccgagcctggcggtcaacctggccgacccctaccggagtctcaaagcgcctggggctcgcggacccggcccagagggcggcggtggcggcagctacttttctggtcagggctcggacaccggcgcgtctctcaagctcgcctcttcggagctggaacgcctgattgtccccaacagcaacggcgtgatcacgacgacgcctacacccccgggacagtacttttacccccgcgggggtggcagcggtggaggtgcagggggcgcagggggcggcgtcaccgaggagcaggagggcttcgccgacggctttgtcaaagccctggacgatctgcacaagatgaaccacgtgacaccccccaacgtgtccctgggcgctaccggggggcccccggctgggcccgggggcgtctacgccggcccggagccacctcccgtttacaccaacctcagcagctactccccagcctctgcgtcctcgggaggcgccggggctgccgtcgggaccgggagctcgtacccgacgaccaccatcagctacctcccacacgcgccgcccttcgccggtggccacccggcgcagctgggcttgggccgcggcgcctccaccttcaaggaggaaccgcagaccgtgccggaggcgcgcagccgggacgccacgccgccggtgtcccccatcaacatggaagaccaagagcgcatcaaagtggagcgcaagcggctgcggaaccggctggcggccaccaagtgccggaagcggaagctggagcgcatcgcgcgcctggaggacaaggtgaagacgctcaaggccgagaacgcggggctgtcgagtaccgccggcctcctccgggagcaggtggcccagctcaaacagaaggtcatgacccacgtcagcaacggctgtcagctgctgcttggggtcaagggacacgccttctgaacgtcccctgcccctttacggacaccccctcgcttggacggctgggcacacgcctcccactggggtccagggagcaggcggtgggcacccaccctgggacctaggggcgccgcaaaccacactggactccggccctcctaccctgcgcccagtccttccacctcgacgtttacaagcccccccttccacttttttttgtatgttttttttctgctggaaacagactcgattcatattgaatataatatatttgtgtatttaacagggaggggaagagggggcgatcgcggcggagctggccccgccgcctggtactcaagcccgcggggacattgggaaggggacccccgccccctgccctcccctctctgcaccgtactgtggaaaagaaacacgcacttagtctctaaagagtttattttaagacgtgtttgtgtttgtgtgtgtttgttctttttattgaatctatttaagtaaaaaaaaaattggttctttattaatttctgttgtctttttttccaagctgggagggcggggggaaaaaaaaagcactggtttgcccccagctcagtgctgttggtggctcggtcctgtatgtgtccccctcgtcggttcggcgcaggcatcttgtggtcccagcccaggagtcccacccttcccgcgtccccagatctccagggttggatggttggggcgcgggacgcggtccagggacccaggagctgaaggcagggtgctccggccgagacttggagtgcgcaggcgcgtccccgcccagccgcgccgccggggctttccccgctgacgcagcggaagcgctgcccatacaaggaccgattctgcccagtgacgcgaccgcggtctctgggcagattccgggaatcccctcccccgctctgccgggcagggccgcggcaccgggaagggggccgggattttcccgggcaggcgactgcccgggcacggaaagccccaggcctgggtccagagcncccgcggtgggcgggcagcgctcctgggctccgggagccacccctgtgccaccttcaagacactggcgcctaggccccgccgcgcccacgccccctccgtctgacctgaccggggcggagggttgctgctgcctccgctgctttggcgacgccgtcccctctacccccaccccctccaggaagggcggcgcccgcctgccagtttcccctcacgggtgccaggccaggagcggggcgactgncaggtctggtcctgccggggcggntgctcgggccgctgggcgccgncaccgncctcgcgctgggtccctcccgcgcagctgggacacgtggaggtgggggtgggggtgctgtgctgctggccgcctagagggagtctggcggttcggggttggaagcccccagagcagtggagaaaaacaggtagagaaacagacaggcagtagttatggaacagacacttcatcaattcatttgtacaatacctaggaacaactagaccctggagacacagctggaccactccagacaagacaataaataaacaagcaaacatggttctttgggggtggtggtaagtgctagtaagaggaaa

SEQ ID NO: 623 - DNA, 1717 bp, Homo sapiens
  Genbank Accession No. U21128
gtggattcttgtccatagtgcatctgctttaagaattaacgaaagcagtgtcaagacagtaaggattcaaaccatttgccaaaaatgagtctaagtgcatttactctcttcctggcattgattggtggtaccagtggccagtactatgattatgattttcccctatcaatttatgggcaatcatcaccaaactgtgcaccagaatgtaactgccctgaaagctacccaagtgccatgtactgtgatgagctgaaattgaaaagtgtaccaatggtgcctcctggaatcaagtatctttaccttaggaataaccagattgaccatattgatgaaaaggcctttgagaatgtaactgatctgcagtggctcattctagatcacaaccttctagaaaactccaagataaaagggagagttttctctaaattgaaacaactgaagaagctgcatataaaccacaacaacctgacagagtctgtgggcccacttcccaaatctctggaggatctgcagcttactcataacaagatcacaaagctgggctcttttgaaggattggtaaacctgaccttcatccatctccagcacaatcggctgaaagaggatgctgtttcagctgcttttaaaggtcttaaatcactcgaataccttgacttgagcttcaatcagatagccagactgccttctggtctccctgtctctcttctaactctctacttagacaacaataagatcagcaacatccctgatgagtatttcaagcgttttaatgcattgcagtatctgcgtttatctcacaacgaactggctgatagtggaatacctggaaattctttcaatgtgtcatccctggttgagctggatctgtcctataacaagcttaaaaacataccaactgtcaatgaaaaccttgaaaactattacctggaggtcaatcaacttgagaagtttgacataaagagcttctgcaagatcctggggccattatcctactccaagatcaagcatttgcgtttggatggcaatcgcatctcagaaaccagtcttccaccggatatgtatgaatgtctacgtgttgctaacgaagtcactcttaattaatatctgtatcctggaacaatattttatggttatgtttttctgtgtgtcagttttcatagtatccatattttattactgtttattacttccatgaattttaaaatctgagggaaatgttttgtaaacatttattttttttaaagaaaagatgaaaggcaggcctatttcatcacaagaacacacacatatacacgaatagacatcaaactcaatgctttatttgtaaatttagtgtttttttatttctactgtcaaatgatgtgcaaaaccttttactggttgcatggaaatcagccaagttttataatccttaaatcttaatgttcctcaaagcttggattaaatacatatggatgttactctcttgcaccaaattatcttgatacattcaaatttgtctggtaaaaaaataggtggtagatattgaggccaagaatattgcaaaatacatgaagcttcatgcacttaaagaagtatttttagaataagaatttgcatacttacctagtgaaacttttctagaattatttttcactctaagtcatgtatgtttctctttgattatttgcatgttatgtttaataagctactagcaaaataaaacatagcaaatggc

SEQ ID NO: 624 - DNA, 2575 bp, Homo sapiens
  Genbank Accession No. U23946
tcggtctctccttgggaaaaaataaaatttgaaccttttggagctgtgtgctaaatcttcagtgggacaatgggttcagacaaaagagtgagtagaacagagcgtagtggaagatacggttccatcatagacagggatgaccgtgatgagcgtgaatcccgaagcaggcggagggactcagattacaaaagatctagtgatgatcggaggggtgatagatatgatggctcccgagactatgacagtccagagagagagcgtgaaagaaggaacagtgaccgatccgaagatggctaccattcagatggtgactatggtgagcacgactataggcatgacatcagtgacgagagggagagcaagaccatcatgctgcgcggccttcccatcaccatcacagagagcgatattcgagaaatgatggagtccttcgaaggccctcagcctgcggatgtgaggctgatgaagaggaaaacaggtgtaagccgtggtttcgccttcgtggagttttatcacttgcaagatgctaccagctggatggaagccaatcagaaaaagttggtgattcaaggaaagcacattgcaatgcattatagcaatcccagacctaagtttgaagattggctttgtaacaagtgctgccttaacaatttcaggaaaagactaaaatgcttccgatgtggagcagacaagtttgactctgaacaggaagtgcctcctggaaccacagagtcggttcagtctgtggattactactgtgatacgatcattcttcggaacatagctccgcacactgtggtggattccatcatgacagcactgtctccttacgcgtctttagctgtcaataacatccgcctcataaaagacaaacagacccagcagaacagaggcttcgcatttgtgcagctgtcctctgcaatggatgcttctcagctgcttcagatattacagagtctccatcctcctttgaaaattgatggcaaaactattggggttgattttgcaaaaagtgccagaaaagacttggtcctctcagatggtaaccgcgtcagcgccttctctgtagctagtacggctattgctgctgctcagtggtcatccacccagtctcaaagtggtgaaggagtcagtgttgactacagttatctgcaaccaggtcaagatggctatgcccaatatgctcagtattcacaggattatcagcagttttatcaacaacaagctggaggattggaatctgatgcatcatctgcatcaggcacagcagtgaccaccacctcagcggctgtagtgtcccagagtcctcagctgtataatcaaacctccaatccacctggctctccgactgaggaagcacagcctagcactagcacaagtacacaggccccagccgcttcccctactggtgtagttcctggtaccaaatatgcagtacctgacacgtccacttaccagtatgatgaatcttcaggatattactatgatccgacaacagggctctattatgaccccaactcgcaatactactataattccttgacccagcagtacctttactgggatggggaaaaagagacctacgtgccagctgcagagtctagctcccaccagcagtcgggcctgcctcctgcaaaagaggggaaagagaagaaggagaaacccaagagcaaaacagcccagcagattgccaaagacatggaacgctgggctaagagtttgaataagcagaaagaaaactttaaaaatagctttcagcctgtcaattccttgagggaagaagaaaggagagaatctgctgcagcagacgctggctttgctctctttgagaagaagggagccttagctgaaaggcagcagctcatcccagaattggtgcgaaatggagatgaggagaatcccctcaaaaggggtctggttgctgcttacagtggtgacagtgacaatgaggaggagctggtggagagacttgagagtgaggaagagaagctagctgactggaagaagatggcctgtctgctctgccggcgccagttcccgaacaaagatgccctagtcaggcaccagcaactctcagaccttcacaagcaaaacatggacatctaccgacgatccaggctgagcgagcaggagctggaagccttggagctaagggagagagagatgaaataccgagaccgagctgcagaaagacgggagaagtacggcattccagaacctccagagcccaagcgcaagaagcagtttgatgccggcactgtgaattacgagcaacccaccaaagatggcattgaccacagtaacattggcaacaagatgctgcaggccatgggctggcgggaaggctctggcttgggacgaaagtgtcaaggcattacggctcccattgaggctcaagttcggctaaagggagctggcctaggagccaaaggcagcgcatatggtttgtcgggcgccgattcctacaaagatgctgtccggaaagccatgtttgcccggttcattgagatggagtgagagagagagagagagagagatgacaaggagcacaagaagtggtccatctcccgaattc

SEQ ID NO: 625 - DNA, 1222 bp, Homo sapiens
  Genbank Accession No. U24169
ccgaacgcccgcagcagggtcagaagggaggtggccggtctccgtcgtgacctctgacggtttctgagcgttggcctttggcacgcgctacacccttttgctttggttctgccatgccgatgtaccaggtaaagccctatcacgggggcggcgcgcctctccgtgtggagcttcccacctgcatgtaccggctccccaacgtgcacggcaggagctacggcccagcgccgggcgctggccacgtgcaggaagagtctaacctgtctctgcaagctcttgagtcccgccaagatgatattttaaaacgtctgtatgagttgaaagctgcagttgatggcctctccaagatgattcaaacaccagatgcagacttggatgtaaccaacataatccaagcggatgagcccacgactttaaccaccaatgcgctggacttgaattcagtgcttgggaaggattacggggcgctgaaagacatcgtgatcaacgcaaacccggcctcccctcccctctccctgcttgtgctgcacaggctgctctgtgagcacttcagggtcctgtccacggtgcacacgcactcctcggtcaagagcgtgcctgaaaaccttctcaagtgctttggagaacagaataaaaaacagccccgccaagactatcagctgggattcactttaatttggaagaatgtgccgaagacgcagatgaaattcagcatccagacgatgtgccccatcgaaggcgaagggaacattgcacgtttcttgttctctctgtttggccagaagcataatgctgtcaacgcaacccttatagatagctgggtagatattgcgatttttcagttaaaagagggaagcagtaaagaaaaagccgctgttttccgctccatgaactctgctcttgggaagagcccttggctcgctgggaatgaactcaccgtagcagacgtggtgctgtggtctgtactccagcagatcggaggctgcagtgtgacagtgccagccaatgtgcagaggtggatgaggtcttgtgaaaacctggctcctttttaacacggccctcaagctccttaagtgaattgccgtaactgattttaaagggtttagattttaagaatggtgctctttcatgcctattatcagtaaggggacttgtattagagtcagagtctttttatttaggccagttgtcaagtgtcaataaaagcgcatcatgtaattta

SEQ ID NO: 626 - DNA, 1902 bp, Homo sapiens
  Genbank Accession No. U26173
gcccctttctttctcctcgtcggcccgagagcaggaacacgataacgaaggaggcccaacttcattcaataaggagcctgacggatttatcccagacggtagaacaaaaggaagaatattgatggattttaaaccagagtttttaaagagcttgagaatacggggaaattaatttgttctcctacacacatagatagggtaaggttgtttctgatgcagctgagaaaaatgcagaccgtcaaaaaggagcaggcgtctcttgatgccagtagcaatgtggacaagatgatggtccttaattctgctttaacggaagtgtcagaagactccacaacaggtgaggacgtgcttctcagtgaaggaagtgtggggaagaacaaatcttctgcatgtcggaggaaacgggaattcattcctgatgaaaagaaagatgctatgtattgggaaaaaaggcggaaaaataatgaagctgccaaaagatctcgtgagaagcgtcgactgaatgacctggttttagagaacaaactaattgcactgggagaagaaaacgccactttaaaagctgagctgctttcactaaaattaaagtttggtttaattagctccacagcatatgctcaagagattcagaaactcagtaattctacagctgtgtactttcaagattaccagacttccaaatccaatgtgagttcatttgtggacgagcacgaaccctcgatggtgtcaagtagttgtatttctgtcattaaacactctccacaaagctcgctgtccgatgtttcagaagtgtcctcagtagaacacacgcaggagagctctgtgcagggaagctgcagaagtcctgaaaacaagttccagattatcaagcaagagccgatggaattagagagctacacaagggagccaagagatgaccgaggctcttacacagcgtccatctatcaaaactatatggggaattctttctctgggtactcacactctcccccactactgcaagtcaaccgatcctccagcaactccccgggaacgtcggaaactgatgatggtgtggtaggaaagtcatctgatggagaagacgagcaacaggtccccaagggccccatccattctccagttgaactcaagcatgtgcatgcaactgtggttaaagttccagaagtgaattcctctgccttgccacacaagctccggatcaaagccaaagccatgcagatcaaagtagaagcctttgataatgaatttgaggccacgcaaaaactttcctcacctattgacatgacatctaaaagacatttcgaactcgaaaagcatagtgccccaagtatggtacattcttctcttactcctttctcagtgcaagtgactaacattcaagattggtctctcaaatcggagcactggcatcaaaaagaactgagtggcaaaactcagaatagtttcaaaactggagttgttgaaatgaaagacagtggctacaaagtttctgacccagagaacttgtatttgaagcaggggatagcaaacttatctgcagaggttgtctcactcaagagacttatagccacacaaccaatctctgcttcagactctgggtaaattactactgagtaagagctgggcatttagaaagatgtcatttgcaatagagcagtccattttgtattatgctgaattttcactggacctgtgatgtcatttcactgtgatgtgcacatgttgtctgtttggtgtctttttgtgcacagattatgatgaagattagattgtgttatcactctgcctgtgtatagtcagatagtccatgcgaaggctgtatatattgaacattatttttgttgttctattataaagtgtgtaagttaccagtttcaataaaggattggtgacaaacacaga

SEQ ID NO: 627 - DNA, 2036 bp, Homo sapiens
  Genbank Accession No. U30521
tttcctctttctctaagagtctctctctccctttccctctctctccccccaatctgtctttctagcatgttgccctttttcaaccacatttgtgtttcaggtgtagagaggagagagagtgaacagggagcggggcttttgtctgttggtctccctggactgaagagagggagaatagaagcccaagactaagattctcaaaatggtttattacccagaactctttgtctgggtcagtcaagaaccatttccaaacaaggacatggagggaaggcttcctaagggaagacttcctgtcccaaaggaagtgaaccgcaagaagaacgatgagacaaacgctgcctccctgactccactgggcagcagtgaactccgctccccaagaatcagttacctccactttttttaatcgtaacacctccatttgtattacatatggtgtatgggtattgatgaggtcatggtatcatatatgggatttttttctgtgtaaatcatcaagtataagaagaaactatgggactctgagccttgctttagagaatttacagtggacaaataggtgtcatcaaaccagtttttaatcattctgactcaagtgaaaacgctcagaatttcacactgtgaatccacgtttacaacccttacaggtgggccttcaggcctggttcgctacaacaatgtcttccacaactcaaactcccaccgcgctcacacaaccggtccactcctgccttttcactcacacagctcccgactgcttcttgcagaggctgagagtccccccccccacctttttttttcatttagatgtaacaaacctagtagtttatgttcatcaattgtctgtatatctctatattttatccatgtactcttttgatgtatagaagtagtttgaaactcattgtttccttgtggtaagtgaccgagatgctgccacaggacctgagacactgatgaatggtgctattttggactttcaacatgctccttggcgaggtagctctgatggagttattttttatttccatgttctaagaaggtgttggtactctgtttccctgaatgttgttctctagactggattgacttgttttccttgtgtcttcagtgtggctttcttcctcagtgttgtaggttgagcgaatgctaccagagtgtgagagaccattgtctcgttggctggcgctcacggacatgcagtcacggtagcgggagcaatcacaaaactgtaatttacttaccaaatctcttcctttccgtagcctcgcctgcctgacttagagaaagaaaagcaataattttacaggcattttgaggtgtctctttgggttctttctgtttgaaaggatatttgtcgaaaaaaagagcaaaaccgttttaaataaactccccctggaaaaaaacccaaaacactggcatctgagtaggaatatgaaaatgacaccttttccaaatattaaattggaaaacaaggtctacaaaatcatgatacttttttaaaaggcagagcattcttttttcggcaattttgataagcaaggtgtagatttacatttttgtccttgctcccaacgaaatggataaacaaaaataaattaccatctactcatggaatgttgttgtgttagccagtctgaaagcccaccttaatttttatataactgtctttagctcttcttttgacagggcaggccttgttctgaactgtttcgcttctgactgttaaacaccgatgacgcatgcactgcacttcttcgttttcttcttgctcccccattggcctgagtttcttgtgcattactcctctccctccttcgttagaataggtatatcagctgtgtaaatagagcaagaaaacagtattctgcatctgtggcatttatgtagagttgcagttgtgtactgctgaaaatgcaggcttttgtaacagtgtgatctttactgatgcactcatgacaagtacccaatgtattttagctattttagtagtatttgttcaataaatacgcaagctgtaaggtaactgtctg

SEQ ID NO: 628 - DNA, 426 bp, Homo sapiens
  Genbank Accession No. U30999
ggtggcaatagagagagttatgctacaattatttcttggtttccacttgcaatggttaattaagtccaaaaacagctgtcagaacctcgagagcagaacatgagaaactcagagctctggaccgaaagcagaaagtttgccgggaaaaaaaaagacaacattattaccatcgattcagtgcctggataaagaggaaagcttacttgtttaatggcagccacatgcacgaagatgctaagaagaaaaagaattccaaatcctcaacttttgaggtttcggctctccaatttaactctttggcaacaggaaacaggttttgcaagttcaaggttcactccctatatgtgattataggaattgttgtggaaatggattaacatacccgtctatgcctaaaagataataaaactgaaatatgtcttcaca

SEQ ID NO: 629 - DNA, 2344 bp, Homo sapiens
  Genbank Accession No. U41518
cctccctgactgggaactcgcttggccgcaatgacctggctgatggtgtgaactcgggccagggcctgggcatcgagatcatcgggaccctccagctggtgctatgcgtgctggctactaccgaccggaggcgccgtgaccttggtggctcagccccccttgccatcggcctctctgtagcccttggacacctcctggctattgactacactggctgtgggattaaccctgctcggtcctttggctccgcggtgatcacacacaacttcagcaaccactggattttctgggtggggccattcatcgggggagccctggctgtactcatctacgacttcatcctggccccacgcagcagtgacctcacagaccgcgtgaaggtgtggaccagcggccaggtggaggagtatgacctggatgccgacgacatcaactccagggtggagatgaagcccaaatagaaggggtctggcccgggcatccacgtagggggcaggggcaggggcgggcggagggaggggaggggtgaaatccatactgtagacactctgacaagctggccaaagtcacttccccaagatctgccagacctgcatggtcaagcctcttatgggggtgtttctatctctttctttctctttctgtttcctggcctcagagcttcctggggaccaagatttaccaattcacccactcccttgaagttgtggaggaggtgaaagaaagggacccacctgctagtcgcccctcagagcatgatgggaggtgtgccagaaagtcccccctcgccccaaagttgctcaccgactcacctgcgcaagtgcctgggattctaccgtaattgctttgtgcctttgggcaggccctccttcttttcctaacatgcaccttgctcccaatggtgcttggagggggaagagatcccaggaggtgcagtggagggggcaagctttgctccttcagttctgcttgctcccaagcccctgacccgctcggacttcctgcctgaccttggaatcgtccctatatcagggcctgagtgacctccttctgcaaagtggcagggaccggcagagctctacaggcctgcagcccctaagtgcaaacacagcatgggtccagaagacgtggtctagaccagggctgctctttccacttgccctgtgttctttccccaggggcatgactgtcgccacacgcctctgtgtacatgtgtgcagagcagacaggctacaaagcagagatcgacagacagccaggtagttggaactttctgttccctctggagaggcttccctacacagggcctgctattgcagaatgaagccatttagagggtgaaggagaaatacccatgttacttctctgacttttagttggtctttccatctatcactgcattatcttgctcattcttcagttctctactccctcttgtcagtgtagacacaggtcaccattatgctggtgtatgtttatcaaagagcacttgagctgtctgaagcccaaagcctgaggacagaaagaccctgatgcaggtcagcccatggaggcagatgcccttcctgggcctgggggttttccaagccctcagctggtcctgaccaggatggagcaagctcttcccttgctcatgagctcctgatcagaggcatttgagcagctgataacctgcacaggcttgctgtatgacccctggccacagccttccctctgcattgacctggaggggagaggtcagccttgacctaatgaggtagctatagttgcagcccaaggacagttcagagatcaggatcagctttgaaggctggattctatctacataagtcctttcaattccaccagggccagagcagctccaccactgtgcacttagccatgatggcaacagaaaccaagagacacaattacgcaggtatttagaaggagagggcaaccagaaggcccttaactatcaccagtgcatcacatctgcagcactctcttctctattccctagcaggaacttctagctcatttaacagataaagaaactgaggcccacggtttcagctagacaatgatttgccaggcctagtaaccaaggccctgtctctggctactccctggaccacgaggctgattcctctcatttccagcttctcagtttctgcctgggcaatgccaggggccaggagtggggagagttgtgatggaggggagaggggtcacacccaccccctgcctggttctaggctgctgcacaccaaggccctgcatctgtctgctctgcatatatgtctctttggagttggaatttcattatatgttaagaaaataaaggaaaatgacttgtaaggtc

SEQ ID NO: 630 - DNA, 1303 bp, Homo sapiens
  Genbank Accession No. U41804
ctgccaatgagctccgccgagtagcaccggggcagggctagcgcttaaaggagccgcgacccctttgcagaccagagggtgacccggatgatggcggccggcgcggccctagccctggccttgtggctactaatgccaccagtggaggtgggaggggcggggcccccgccaatccaggacggtgagttcacgttcctgttgccggcggggaggaagcagtgtttctaccagtccgcgccggccaacgcaagcctcgagaccgaataccaggtgatcggaggtgctggactggacgtggacttcacgctggagagccctcagggcgtgctgttggtcagcgagtcccgcaaggctgatggggtacacacggtggagccaacggaggccggggactacaagctgtgctttgacaactccttcagcaccatctccgagaagctggtgttctttgaactgatctttgacagcctccaggatgacgaggaggtcgaaggatgggcagaggctgtggagcccgaggagatgctggatgttaaaatggaggacatcaaggagtccattgagaccatgcggacccggctggagcgcagcatccagatgctcacgctactgcgggccttcgaggcacgtgaccgcaacctgcaagagggcaacttggagcgggtcaacttctggtcagctgtcaacgtggcggtgctgctgctggtggctgtgctgcaggtctgcacgctcaagcgcttcttccaggacaagcgcccggtgcccacgtagcccctgccatggaaggaagaacgggacaaaggaggggcagcagggtgtgtgcatatgagacttgggggtccctccccaattttagtttcctgccaaaacgggagtgtgcagtcagggcctgcggtctggccccatgagtctccttccgtcctcagcgggcagggaacacctctggcttgtagaagggacggctcagtggctgcaccgacggtcctggaaatctcacatggtgggcactgcagcgttggaacgtgagcctcggatttcctggcccctctactgtaaatgtgccttagcctaagcctcccatcctgtgttagcgttgcctggtgcggggcagggcctaacaaggaaacctgggccctccaagccaggttgaggtctggtaacagaatgccaggaagggggcctggaagaccacctgccccggcccctctcctgcaggggccccacacaggcatgagggatggcccggccaaagtctaggcagaagcctcctataacaaagggtggtgtggcctgggcattggag

SEQ ID NO: 631 - DNA, 1443 bp, Homo sapiens
  Genbank Accession No. U45955
ctgcggtcagcgcacgtgcccgcgagacctgcaaacttgtgccaccggctctgcccgtccccggggagcccgaacgccccgcagccctcacccctcccgccagtctccagccatgggctgctttgaatgctgcatcaagtgtctgggaggagtcccctacgcctccctggtggccaccatcctctgcttctccggggtggccttattctgcggctgtgggcatgtggctctcgcaggcaccgtggcgattcttgagcaacacttctccaccaacgccagtgaccatgccttgctgagcgaggtgatacaactgatgcagtatgtcatctatggaattgcgtcctttttcttcttgtatgggatcattctgttggcagaaggcttttacaccacaagtgcagtgaaagaactgcacggtgagtttaaaacaaccgcttgtggccgatgcatcagtggaatgttcgttttcctcacctatgtgcttggagtggcctggctgggtgtgtttggtttctcagcggtgcccgtgtttatgttctacaacatatggtcaacttgtgaagtcatcaagtcaccgcagaccaacgggaccacgggtgtggagcagatctgtgtggatatccgacaatacggtatcattccttggaatgctttccccggaaaaatatgtggctctgccctggagaacatctgcaacacaaacgagttctacatgtcctatcacctgttcattgtggcctgtgcaggagctggtgccaccgtcattgccctgctgatctacatgatggctactacatataactatgcggttttgaagtttaagagtcgggaagattgctgcactaaattctaaattgcataaggagttttagagagctatgctctgtagcatgaaatatcactgacactccagactaaagcagagtctaggtttctgcaattttgttacagtaatttgtaaatagctttagtaaactcaccttgcatggtagattaataagatgacttactgtacatgaattacacaataatgagatctggtggctatttccacattttgaaaaggattcagttatttactgacagtggtgagcatcctttttaaaataatgttctgatacttaaacattagagagcagtatctttaaatgaattattaacactttggaatacttacattttctgttatttttgattgcctgataaccagtttcaatgatgaaaatgaaaacaagtgctgaagatgaaatggaagagaaccgttttaatctggattttgttttgtcacacctggaaaatactttgcaaatatgttctaaattgaaaacaatttttttatgatcacatggttcactaccaaatgaccctcaaataagccagatgaaaatttgaagaaaaaggtcacccagttctctggaaaaaaaaaaaaaaaaaaaaaaaaaa

SEQ ID NO: 632 - DNA, 554 bp, Homo sapiens
  Genbank Accession No. U52969
gccagaaccggtggagcagcgacccctgagcagtgttctctgtgctgagcggcgggactgagctgttgagttagagccaacatgagtgagcgacaaggtgctggggcaaccaatggaaaagacaagacatctggtgaaaatgatggacagaagaaagttcaagaagaatttgacattgacatggatgcaccagagacagaacgtgcagcggtggccattcagtctcagttcagaaaattccagaagaagaaggctgggtctcagtcctagtgggagaaccccctcctagtccacctgaaaacaccaaattcaaccatcatctgtcaagaaattaaaagaacaacaccctagagagaagtcatccacacacaatccacacacgcatagcaaacctccaatgcatgtacagaaacctgtgatatttatacccttgtaggaaggtatagacaatggaattgtgagtagcttaatctctatgtttctctccattttcattcctcctgcaactattttccttgatgttgtaataaaatgaagttacgatgagtgaaaaa

SEQ ID NO: 633 - DNA, 1974 bp, Homo sapiens
  Genbank Accession No. U53225
  unsure (1)..(1974): n = a or c or g or t
cgggatcaatttgatttgacagtcggtataactgatcctgagaagatggcgtcgggtggtggtggctgtagcgcttcggagagactgcctccgcccttccccggcctggagccggagtccgagggggcggccgggggatcagaacccgaggctggggacagcgacaccgagggggaggacattttcaccggcgccgcggtggtcagtaaacatcagtctccaaagataactacatcccttcttcccatcaacaatggctccaaagaaaatgggatccatgaagaacaagaccaagagccacaggatctctttgcagatgccacagtggagctatccttggacagcacacaaaataatcagaagaaggtgctagccaaaacactcatttytcttcctcctcaggaagccacaaattcttcgaagccccagccaacctatgaggagctagaggaagaagaacaggaggatcaatttgatttgacagtcggtataactgatcctgagaagataggggatggtatgaatgcatatgtagcctacaaagttacaacacagacaagcttaccattgttcagaagcaaacagtttgcagtaaaaagaagatttagtgactttctgggtctttatgagaagctttccgagaagcactctcagaatggcttcattgtccctccgcccccggagaagagcctcatagggatgacaaaagtgaaagttgggaaggaagattcttcttctgcagaatttcttgaaaaacggagggccgctttagaaaggtaccttcagaggattgtaaatcatcctaccatgttacaggaccctgacgtcagagagttcttggaaaaagaagagctgccacgtgccgtgggtacccagacattgagtggtgctggtctcctcaagatgttcaacaaagccacagatgccgtcagcaaaatgaccatcaagatgaatgaatcagacatttggtttgaggagaagctccaggaggtagagtgtgaggagcagcgcttacggaaactgcatgctgttgtagaaactctagtcaaccataggaaagagctagcgctgaacacagcccagtttgcaaagagtctagccatgcttgggagctctgaggacaacacggcattgtcacgggcactctcccagctggctgaggtggaagaaaaaattgagcagctccaccaggaacaggccaacaatgacttcttcctccttgctgagctcctgagtgactacattcgcctcctggccatagtccgcgctgccttcgaccagcgcatgaagacatggcagcgctggcaggatgcccaagccacactgcagaagaagcgggaggccgaggctcggctgctgtgggccaacaagcctgataagctgcagcaggccaaggacgagatcctcgagtgggagtctcgggtgactcaatatgaaagggacttcgagaggatttcaacagtggtccgaaaagaagtgatacggtttgagaaagagaaatccaaggacttcaagaaccacgtgatcaagtaccttgagacactcctttactcacagcagcagctggcaaagtactgggaagccttccttcctgaggcaaaggccatctcctaatggaccaaggaccccagagcccacctgtgtgacgctgcctttttatacactgtcctcctccaccttgatggacccctagtgatgcatcctgcctaggctggacttaaccccttcctccntgtccccacgaccaactgtccccagttactctaaccgttatttcatttagctnccatatatattttcttacctaagagaatagtttcctgctttaagnaaaagacctacaataggtggtggaattatgggatggggtggagtattgatataaatatataaatacaaatgtatatttttcaggatgtggtttaggaactgggaataacgttttcatggcaccatcaggagtaacagaaaacc

SEQ ID NO: 634 - DNA, 3025 bp, Homo sapiens
  Genbank Accession No. U53445
gcacgagcaggcagttcagattaaagaagctaattgatcaagaaatcaagtctcaggaggagaaggagcaagaaaaggagaaaagggtcaccaccctgaaagaggagctgaccaagctgaagtcttttgctttgatggtggtggatgaacagcaaaggctgacggcacagctcacccttcaaagacagaaaatccaagagctgaccacaaatgcaaaggaaacacataccaaactagcccttgctgaagccagagttcaggaggaagagcagaaggcaaccagactagagaaggaactgcaaacgcagaccacaaagtttcaccaagaccaagacacaattatggcgaagctcaccaatgaggacagtcaaaatcgccagcttcaacaaaagctggcagcactcagccggcagattgatgagttagaagagacaaacaggtctttacgaaaagcagaagaggagctgcaagatataaaagaaaaaatcagtaagggagaatatggaaacgctggtatcatggctgaagtggaagagctcataaaaatggaggagcagtgcagagatctcaataagaggcttgaaagggagacgttacagagtaaagactttaaactagaggttgaaaaactcagtaaaagaattatggctctggaaaagttagaagacgctttcaacaaaagcaaacaagaatgctactctctgaaatgcaatttagaaaaagaaaggatgaccacaaagcagttgtctcaagaactggagagtttaaaagtaaggatcaaagagctagaagccattgaaagtcggctagaaaagacagaattcactctaaaagaggatttaactaaactgaaaacattaactgtgatgtttgtagatgaacggaaaacaatgagtgaaaaattaaagaaaactgaagataaattacaagctgcttcttctcagcttcaagtggagcaaaataaagtaacaacagttactgagaagttaattgaggaaactaaaagggcgctcaagtccaaaaccgatgtagaagaaaagatgtacagcgtaaccaaggagagagatgatttaaaaaacaaattgaaagcggaagaagagaaaggaaatgatctcctgtcaagagttaatatgttgaaaaataggcttcaatcattggaagcaattgagaaagatttcctaaaaaacaaattaaatcaagactctgggaaatccacaacagcattacaccaagaaaacaataagattaaggagctctctcaagaagtggaaagactgaaactgaagctaaaggacatgaaagccattgaggatgacctcatgaaaacagaagatgaatatgagactctagaacgaaggtatgctaatgaacgagacaaagctcaatttttatctaaagagctagaacatgttaaaatggaacttgctaagtacaagttagcagaaaagacagagaccagccatgaacaatggcttttcaaaaggcttcaagaagaagaagctaagtcagggcacctctcaagagaagtggatgcattaaaagagaaaattcatgaatacatggcaactgaagacctaatatgtcacctccagggagatcactcagtctgcaaaaaaaaactaaatcaacaagaaaacaggaacagagatttaggaagagagattgaaaacctcactaaggagttagagaggtaccggcatttcagtaagagcctcaggcctagtctcaatggaagaagaatttccgatcctcaagtattttctaaagaagttcagacagaagcagtagacaatgaaccacctgattacaagagcctcattcctctggaacgtgcagtcatcaatggtcagttatatgaggagagtgagaatcaagacgaggaccctaatgatgagggatctgtgctgtccttcaaatgcagccagtctactccatgtcctgttaacagaaagctatggattccctggatgaaatccaaggagggccatcttcagaatggaaaaatgcaaactaaacccaatgccaactttgtgcaacctggagatctagtcctaagccacacacctgggcagccacttcatataaaggttactccagaccatgtacaaaacacagccactcttgaaatcacaagtccaaccacagagagtcctcactcttacacgagtactgcagtgataccgaactgtggcacgccaaagcaaaggataaccatcctccaaaacgcctccataacaccagtaaagtccaaaacctctaccgaagacctcatgaatttagaacaaggcatgtccccaattaccatggcaacctttgccagagcacagaccccagagtcttgtggttctctaactccagaaaggacaatgtccctattcaggttttggctgtgactggttcagctagctctcctgagcagggacgctccccagaaccaacagaaatcagtgccaagcatgcgatattcagagtctccccagaccggcagtcatcatggcagtttcagcgttcaaacagcaatagctcaagtgtgataactactgaggataataaaatccacattcacttaggaagtccttacatgcaagctgtagccagcccttcagcaccactgcaggataaccgaactcaaggcttaattaacggggcactaaacaaaacaaccaataaagtcaccagcagtattactatcacaccaacagccacacctcttcctcgacaatcacaaattacagtaagtaatatatataactgaccacgctcaccctcatccagtccatactgatatttttgcaaggaactcaatccttttttaatcatccctccatatcccccaagactgactgaactcgtactttgggaaggtttgtgcatgaactatacaagagtatctgaaactaactgttgcctgcatagtcatatcgagtgtgcacttactgtatatcttttcatttacatacttgtatggaaaatatttagtctgcacttgtataaatacatctttatgtatttgaaaaaaaaaaaa

SEQ ID NO: 635 - DNA, 2093 bp, Homo sapiens
  Genbank Accession No. U57316
gaattccggcgaaaccactcatgtctttgggcgaagccttctccggtccattttcaccgttacccgccggcagctgctggaaaagttccgagtggagaaggacaaattggtgcccgagaagaggaccctcatcctcactcacttccccaagtaaggctccttctggcctaccaggatttggccccaagttcacatcctccctgttgtccccttttttccaggaaggcttcctggattggtccctcctctccctccatgggccttttgggatctgggcgtctacctggcagacttgcccatggcccagaagcaacttgctagtactagtctggggatggcagattcctgtccatgctggaggaggagatctatggggcaaactctccaatctgggagtcaggcttcaccatgccaccctcagaggggacacagctggttccccggccagcttcagtcagtgcagcggttgttcccagcacccccatcttcagccccagcatgggtgggggcagcaacagctccctgagtctggattctgcaggggccgagcctatgccaggcgagaagaggacgctcccagagaacctgaccctggaggatgccaagcggctccgtgtgatgggtgacatccccatggagctggtcaatgaggtcatgctgaccatcactgaccctgctgccatgctggggcctgagacgagcctgctttcggccaatgcggcccgggatgagacagcccgcctggaggagcgccgcggcatcatcgagttccatgtcatcggcaactcactgacgcccaaggccaaccggcgggtgttgctgtggctcgtggggctgcagaatgtcttttcccaccagctgccgcgcatgcctaaggagtatatcgcccgcctcgtctttgacccgaagcacaagactctggccttgatcaaggatgggcgggtcatcggtggcatctgcttccgcatgtttcccacccagggcttcacggagattgtcttctgtgctgtcacctcgaatgagcaggtcaagggttatgggacccacctgatgaaccacctgaaggagtatcacatcaagcacaacattctctacttcctcacctacgccgacgagtacgccatcggctacttcaaaaagcagggtttctccaaggacatcaaggtgcccaagagccgctacctgggctacatcaaggactacgagggagcgacgctgatggagtgtgagctgaatccccgcatcccctacacggagctgtcccacatcatcaagaagcagaaagagatcatcaagaagctgattgagcgcaaacaggcccagatccgcaaggtctacccggggctcagctgcttcaaggagggcgtgaggcagatccctgtggagagcgttcctggcattcgagagacaggctggaagccattggggaaggagaaggggaaggagctgaaggaccccgaccagctctacacaaccctcaaaaacctgctggcccaaatcaagtctcaccccagtgcctggcccttcatggagcctgtgaagaagtcggaggcccctgactactacgaggtcatccgcttccccattgacctgaagaccatgactgagcggctgcgaagccgctactacgtgacccggaagctctttgtggccgacctgcagcgggtcatcgccaactgtcgcgagtacaaccccccggacagcgagtactgccgctgtgccagcgccctggagaagttcttctacttcaagctcaaggagggaggcctcattgacaagtaggcccatctttgggccgcagccctgacctggaatgtctccacctcggattctgatctgatccttagggggtgccctggccccacggacccgactcagcttgagacactccagccaagggtcctccggacccgatcctgcagctctttctggaccttcaggcacccccaagcgtgcagctctgtcccagccttcactgtgtgtgagaggtctcctgggttggggcccagcccctctagagtagctggtggccagggatgaaccttgcccagccgtggtggcccccaggcctggtccccaagagcccggaattc

SEQ ID NO: 636 - DNA, 6981 bp, Homo sapiens
  Genbank Accession No. U60975
ttgctgcgtcaactgtgttccctttggcctggctgagtttgatactgtggggattcagtttaggcgctggcccgaggatatcccagcggtggtacttcggagacacctgtctgcatctgactgagccggctctcctggcctcgcgctgcacattctctcctggcggcggcgccacctgcagtagcgttcgcccgaacatggcgacacggagcagcaggagggagtcgcgactcccgttcctattcaccctggtcgcactgctgccgcccggagctctctgcgaagtctggacgcagaggctgcacggcggcagcgcgcccttgccccaggaccggggcttcctcgtggtgcagggcgacccgcgcgagctgcggctgtgggcgcgcggggatgccaggggggcgagccgcgcggacgagaagccgctccggaggaaacggagcgctgccctgcagcccgagcccatcaaggtgtacggacaggttagtctgaatgattcccacaatcagatggtggtgcactgggctggagagaaaagcaacgtgatcgtggccttggcccgagatagcctggcattggcgaggcccaagagcagtgatgtgtacgtgtcttacgactatggaaaatcattcaagaaaatttcagacaagttaaactttggcttgggaaataggagtgaagctgttatcgcccagttctaccacagccctgcggacaacaagcggtacatctttgcagacgcttatgcccagtacctctggatcacgtttgacttctgcaacactcttcaaggcttttccatcccatttcgggcagctgatctcctcctacacagtaaggcctccaaccttctcttgggctttgacaggtcccaccccaacaagcagctgtggaagtcagatgactttggccagacctggatcatgattcaggaacatgtcaagtccttttcttggggaattgatccctatgacaaaccaaataccatctacattgaacgacacgaaccctctggctactccactgtcttccgaagtacagatttcttccagtcccgggaaaaccaggaagtgatccttgaggaagtgagagattttcagcttcgggacaagtacatgtttgctacaaaggtggtgcatctcttgggcagtgaacagcagtcttctgtccagctctgggtctcctttggccggaagcccatgagagcagcccagtttgtcacaagacatcctattaatgaatattacatcgcagatgcctccgaggaccaggtgtttgtgtgtgtcagccacagtaacaaccgcaccaatttatacatctcagaggcagaggggctgaagttctccctgtccttggagaacgtgctctattacagcccaggaggggccggcagtgacaccttggtgaggtattttgcaaatgaaccatttgctgacttccaccgagtggaaggattgcaaggagtctacattgctactctgattaatggttctatgaatgaggagaacatgagatcggtcatcacctttgacaaagggggaacctgggagtttcttcaggctccagccttcacgggatatggagagaaaatcaattgtgagctttcccagggctgttcccttcatctggctcagcgcctcagtcagctcctcaacctccagctccggagaatgcccatcctgtccaaggagtcggctccaggcctcatcatcgccactggctcagtgggaaagaacttggctagcaagacaaacgtgtacatctctagcagtgctggagccaggtggcgagaggcacttcctggacctcactactacacatggggagaccacggcggaatcatcacggccattgcccagggcatggaaaccaacgagctaaaatacagtaccaatgaaggggagacctggaaaacattcatcttctctgagaagccagtgtttgtgtatggcctcctcacagaacctggggagaagagcactgtcttcaccatctttggctcgaacaaagagaatgtccacagctggctgatcctccaggtcaatgccacggatgccttgggagttccctgcacagagaatgactacaagctgtggtcaccatctgatgagcgggggaatgagtgtttgctgggacacaagactgttttcaaacggcggaccccccatgccacatgcttcaatggagaggactttgacaggccggtggtcgtgtccaactgctcctgcacccgggaggactatgagtgtgacttcggtttcaagatgagtgaagatttgtcattagaggtttgtgttccagatccggaattttctggaaagtcatactcccctcctgtgccttgccctgtgggttctacttacaggagaacgagaggctaccggaagatttctggggacacttgtagcggaggagatgttgaagcgcgactggaaggagagctggtcccctgtcccctggcagaagagaacgagttcattctgtatgctgtgaggaaatccatctaccgctatgacctggcctcgggagccaccgagcagttgcctctcaccgggctacgggcagcagtggccctggactttgactatgagcacaactgtttgtattggtccgacctggccttggacgtcatccagcgcctctgtttgaatggaagcacagggcaagaggtgatcatcaattctggcctggagacagtagaagctttggcttttgaacccctcagccagctgctttactgggtagatgcaggcttcaaaaagattgaggtagctaatccagatggcgacttccgactcacaatcgtcaattcctctgtgcttgatcgtcccagggctctggtcctcgtgccccaagagggggtgatgttctggacagactggggagacctgaagcctgggatttatcggagcaatatggatggttctgctgcctatcacctggtgtctgaggatgtgaagtggcccaatggcatctctgtggacgaccagtggatttactggacggatgcctacctggagtgcatagagcggatcacgttcagtggccagcagcgctctgtcattctggacaacctcccgcacccctatgccattgctgtctttaagaatgaaatctactgggatgactggtcacagctcagcatattccgagcttccaaatacagtgggtcccagatggagattctggcaaaccagctcacggggctcatggacatgaagattttctacaaggggaagaacactggaagcaatgcctgtgtgcccaggccatgcagcctgctgtgcctgcccaaggccaacaacagtagaagctgcaggtgtccagaggatgtgtccagcagtgtgcttccatcaggggacctgatgtgtgactgccctcagggctatcagctcaagaacaatacctgtgtcaaagaagagaacacctgtcttcgcaaccagtatcgctgcagcaacgggaactgtatcaacagcatttggtggtgtgactttgacaacgactgtggagacatgagcgatgagagaaactgccctaccaccatctgtgacctggacacccagtttcgttgccaggagtctgggacttgtatcccactgtcctataaatgtgaccttgaggatgactgtggagacaacagtgatgaaagtcattgtgaaatgcaccagtgccggagtgacgagtacaactgcagttccggcatgtgcatccgctcctcctgggtatgtgacggggacaacgactgcagggactggtctgatgaagccaactgtaccgccatctatcacacctgtgaggcctccaacttccagtgccgaaacgggcactgcatcccccagcggtgggcgtgtgacggggatacggactgccaggatggttccgatgaggatccagtcaactgtgagaagaagtgcaatggattccgctgcccaaacggcacttgcatcccatccagcaaacattgtgatggtctgcgtgattgctctgatggctccgatgaacagcactgcgagcccctctgtacgcacttcatggactttgtgtgtaagaaccgccagcagtgcctgttccactccatggtctgtgacggaatcatccagtgccgcgacgggtccgatgaggatgcggcgtttgcaggatgctcccaagatcctgagttccacaaggtatgtgatgagttcggtttccagtgtcagaatggagtgtgcatcagtttgatttggaagtgcgacgggatggatgattgcggcgattattctgatgaagccaactgcgaaaaccccacagaagccccaaactgctcccgctacttccagtttcggtgtgagaatggccactgcatccccaacagatggaaatgtgacagggagaacgactgtggggactggtctgatgagaaggattgtggagattcacatattcttcccttctcgactcctgggccctccacgtgtctgcccaattactaccgctgcagcagtgggacctgcgtgatggacacctgggtgtgcgacgggtaccgagattgtgcagatggctctgacgaggaagcctgccccttgcttgcaaacgtcactgctgcctccactcccacccaacttgggcgatgtgaccgatttgagttcgaatgccaccaaccgaagacgtgtattcccaactggaagcgctgtgacggccaccaagattgccaggatggccgggacgaggccaattgccccacacacagcaccttgacttgcatgagcagggagttccagtgcgaggacggggaggcctgcattgtgctctcggagcgctgcgacggcttcctggactgctcggacgagagcgatgaaaaggcctgcagtgatgagttgactgtgtacaaagtacagaatcttcagtggacagctgacttctctggggatgtgactttgacctggatgaggcccaaaaaaatgccctctgcttcttgtgtatataatgtctactacagggtggttggagagagcatatggaagactctggagacccacagcaataagacaaacactgtattaaaagtcttgaaaccagataccacgtatcaggttaaagtacaggttcagtgtctcagcaaggcacacaacaccaatgactttgtgaccctgaggaccccagagggattgccagatgcccctcgaaatctccagctgtcactccccagggaagcagaaggtgtgattgtaggccactgggctcctcccatccacacccatggcctcatccgtgagtacattgtagaatacagcaggagtggttccaagatgtgggcctcccagagggctgctagtaactttacagaaatcaagaacttattggtcaacactctatacaccgtcagagtggctgcggtgactagtcgtggaataggaaactggagcgattctaaatccattaccaccataaaaggaaaagtgatcccaccaccagatatccacattgacagctatggtgaaaattatctaagcttcaccctgaccatggagagtgatatcaaggtgaatggctatgtggtgaaccttttctgggcatttgacacccacaagcaagagaggagaactttgaacttccgaggaagcatattgtcacacaaagttggcaatctgacagctcatacatcctatgagatttctgcctgggccaagactgacttgggggatagccctctggcatttgagcatgttatgaccagaggggttcgcccacctgcacctagcctcaaggccaaagccatcaaccagactgcagtggaatgtacctggaccggcccccggaatgtggtttatggtattttctatgccacgtcctttcttgacctctatcgcaacccgaagagcttgactacttcactccacaacaagacggtcattgtcagtaaggatgagcagtatttgtttctggtccgtgtagtggtaccctaccaggggccatcctctgactacgttgtagtgaagatgatcccggacagcaggcttccaccccgtcacctgcatgtggttcatacgggcaaaacctccgtggtcatcaagtgggaatcaccgtatgactctcctgaccaggacttgttgtatgcaattgcagtcaaagatctcataagaaagactgacaggagctacaaagtaaaatcccgtaacagcactgtggaatacacccttaacaagttggagcctggcggaaaataccacatcattgtccaactggggaacatgagcaaagattccagcataaaaattaccacagtttcattatcagcacctgatgccttaaaaatcataacagaaaatgatcatgttcttctgttttggaaaagcctggctttaaaggaaaagcattttaatgaaagcaggggctatgagatacacatgtttgatagtgccatgaatatcacagcttaccttgggaatactactgacaatttctttaaaatttccaacctgaagatgggtcataattacacgttcaccgtccaagcaagatgcctttttggcaaccagatctgtggggagcctgccatcctgctgtacgatgagctggggtctggtgcagatgcatctgcaacgcaggctgccagatctacggatgttgctgctgtggtggtgcccatcttattcctgatactgctgagcctgggggtggggtttgccatcctgtacacgaagcaccggaggctgcagagcagcttcaccgccttcgccaacagccactacagctccaggctggggtccgcaatcttctcctctggggatgacctgggggaagatgatgaagatgcccctatgataactggattttcagatgacgtccccatggtgatagcctgaaagagctttcctcactagaaaccaaatggtgtaaatattttatttgataaagatagttgatggtttattttaaaagatgcactttgagttgcaatatgttatttttatatgggccaaaaacaaaaaaaaaaaaaaaaaa

SEQ ID NO: 637 - DNA, 2016 bp, Homo sapiens
  Genbank Accession No. U62015
ggcacgaggagcagcgcccgcgccctccgcgccttctccgccgggacctcgagcgaaagacgcccgcccgccgcccagccctcgcctccctgcccaccgggcccaccgcgccgccaccccgaccccgctgcgcacggcctgtccgctgcacaccagcttgttggcgtcttcgtcgccgcgctcgccccgggctactcctgcgcgccacaatgagctcccgcatcgccagggcgctcgccttagtcgtcacccttctccacttgaccaggctggcgctctccacctgccccgctgcctgccactgccccctggaggcgcccaagtgcgcgccgggagtcgggctggtccgggacggctgcggctgctgtaaggtctgcgccaagcagctcaacgaggactgcagcaaaacgcagccctgcgaccacaccaaggggctggaatgcaacttcggcgccagctccaccgctctgaaggggatctgcagagctcagtcagagggcagaccctgtgaatataactccagaatctaccaaaacggggaaagtttccagcccaactgtaaacatcagtgcacatgtattgatggcgccgtgggctgcattcctctgtgtccccaagaactatctctccccaacttgggctgtcccaaccctcggctggtcaaagttaccgggcagtgctgcgaggagtgggtctgtgacgaggatagtatcaaggaccccatggaggaccaggacggcctccttggcaaggagctgggattcgatgcctccgaggtggagttgacgagaaacaatgaattgattgcagttggaaaaggcagctcactgaagcggctccctgtttttggaatggagcctcgcatcctatacaaccctttacaaggccagaaatgtattgttcaaacaacttcatggtcccagtgctcaaagacctgtggaactggtatctccacacgagttaccaatgacaaccctgagtgccgccttgtgaaagaaacccggatttgtgaggtgcggccttgtggacagccagtgtacagcagcctgaaaaagggcaagaaatgcagcaagaccaagaaatcccccgaaccagtcaggtttacttacgctggatgtttgagtgtgaagaaataccggcccaagtactgcggttcctgcgtggacggccgatgctgcacgccccagctgaccaggactgtgaagatgcggttccgctgcgaagatggggagacattttccaagaacgtcatgatgatccagtcctgcaaatgcaactacaactgcccgcatgccaatgaagcagcgtttcccttctacaggctgttcaatgacattcacaaatttagggactaaatgctacctgggtttccagggcacacctagacaaacaagggagaagagtgtcagaatcagaatcatggagaaaatgggcgggggtggtgtgggtgatgggactcattgtagaaaggaagccttgctcattcttgaggagcattaaggtatttcgaaactgccaagggtgctggtgcggatggacactaatgcagccacgattggagaatactttgcttcatagtattggagcacatgttactgcttcattttggagcttgtggagttgatgactttctgttttctgtttgtaaattatttgctaagcatattttctctaggcttttttccttttggggttctacagtcgtaaaagagataataagattagttggacagtttaaagcttttattcgtcctttgacaaaagtaaatgggagggcattccatcccttcctgaagggggacactccatgagtgtctgtgagaggcagctatctgcactctaaactgcaaacagaaatcaggtgttttaagactgaatgttttatttatcaaaatgtagcttttggggagggaggggaaatgtaatactggaataatttgtaaatgattttaattttatattcagtgaaaagattttatttatggaattaaccatttaataaagaaatatttacct

SEQ ID NO: 638 - DNA, 747 bp, Homo sapiens
  Genbank Accession No. U65579
ctggcctgcttggcaaggcaagtagcggcggcgcttcaagatgcgctgcctgaccacgcctatgctgctgcgggccctggcccaggctgcacgtgcaggacctcctggtggccggagcctccacagcagtgcagtggcagccacctacaagtatgtgaacatgcaggatcccgagatggacatgaagtcagtgactgaccgggcagcccgcaccctgctgtggactgagctcttccgaggcctgggcatgaccctgagctacctgttccgggaaccggccaccatcaactacccgttcgagaagggcccgctgagccctcgcttccgtggggagcatgcgctgcgccggtacccatccggggaggagcgttgcattgcctgcaagctctgcgaggccatctgccccgcccaggccatcaccatcgaggctgagccaagagctgatggcagccgccggaccacccgctatgacatcgacatgaccaagtgcatctactgcggcttctgccaggaggcctgtcccgtggatgccatcgtcgagggccccaactttgagttctccacggagacccatgaggagctgctgtacaacaaggagaagttgctcaacaacggggacaagtgggaggccgagatcgccgccaacatccaggctgactacttgtatcggtgacgccccaccggcccgcagcccctgctgcccaataaaaccactccgaccccacggaaaaaaaaaaaaaaaaaaaa

SEQ ID NO: 639 - DNA, 3496 bp, Homo sapiens
  Genbank Accession No. U69263
cgaactctgaaaaggcggggcagcgggcctgcagctcctggagttcagggagacccggaaatctcaccctgccctcttcttgtgttgtgtttgtcacagccttgcccctcttgctcgccttgaaaatggaaaagatgctcgcaggctgctttctgctgatcctcggacagatcgtcctcctccctgccgaggccagggagcggtcacgtgggaggtccatctctaggggcagacacgctcggacccacccgcagacggcccttctggagagttcctgtgagaacaagcgggcagacctggttttcatcattgacagctctcgcagtgtcaacacccatgactatgcaaaggtcaaggagttcatcgtggacatcttgcaattcttggacattggtcctgatgtcacccgagtgggcctgctccaatatggcagcactgtcaagaatgagttctccctcaagaccttcaagaggaagtccgaggtggagcgtgctgtcaagaggatgcggcatctgtccacgggcaccatgaccgggctggccatccagtatgccctgaacatcgcattctcagaagcagagggggcccggcccctgagggagaatgtgccacgggtcataatgatcgtgacggatgggagacctcaggactccgtggccgaggtggctgctaaggcacgggacacgggcatcctaatctttgccattggtgtgggccaggtagacttcaacaccttgaagtccattgggagtgagccccatgaggaccatgtcttccttgtggccaatttcagccagattgagacgctgacctccgtgttccagaagaagttgtgcacggcccacatgtgcagcaccctggagcataactgtgcccacttctgcatcaacatccctggctcatacgtctgcaggtgcaaacaaggctacattctcaactcggatcagacgacttgcagaatccaggatctgtgtgccatggaggaccacaactgtgagcagctctgtgtgaatgtgccgggctccttcgtctgccagtgctacagtggctacgccctggctgaggatgggaagaggtgtgtggctgtggactactgtgcctcagaaaaccacggatgtgaacatgagtgtgtaaatgctgatggctcctacctttgccagtgccatgaaggatttgctcttaacccagataaaaaaacgtgcacaaagatagactactgtgcctcatctaatcacggatgtcagcacgagtgtgttaacacagatgattcctattcctgccactgcctgaaaggctttaccctgaatccagataagaaaacctgcagaaggatcaactactgtgcactgaacaaaccgggctgtgagcatgagtgcgtcaacatggaggagagctactactgccgctgccaccgtggctacactctggaccccaatggcaaaacctgcagccgagtggaccactgtgcacagcaggaccatggctgtgagcagctgtgtctgaacacggaggattccttcgtctgccagtgctcagaaggcttcctcatcaacgaggacctcaagacctgctcccgggtggattactgcctgctgagtgaccatggttgtgaatactcctgtgtcaacatggacagatcctttgcctgtcagtgtcctgagggacacgtgctccgcagcgatgggaagacgtgtgcaaaattggactcttgtgctctgggggaccacggttgtgaacattcgtgtgtaagcagtgaagattcgtttgtgtgccagtgctttgaaggttatatactccgtgaagatggaaaaacctgcagaaggaaagatgtctgccaagctatagaccatggctgtgaacacatttgtgtgaacagtgatgactcatacacgtgcgagtgcttggtgggattccggctcgctgaggatgggaaacgctgccgaaggaaggatgtctgcaaatcaacccaccatggctgcgaacacatttgtgttaataatgggaattcctacatctgcaaatgctcagagggatttgttctagctgaggacggaagacggtgcaagaaatgcactgaaggcccaattgacctggtctttgtgatcgatggatccaagagtcttggagaagagaattttgaggtcgtgaagcagtttgtcactggaattatagattccttgacaatttcccccaaagccgctcgagtggggctgctccagtattccacacaggtccacacagagttcactctgagaaacttcaactcagccaaagacatgaaaaaagccgtggcccacatgaaatacatgggaaagggctctatgactgggctggccctgaaacacatgtttgagagaagttttacccaaggagaaggggccaggcctttttccacaagggtgcccagagcagccattgtgttcaccgacggacgggctcaggatgacgtctccgagtgggccagtaaagccaaggccaatggtatcactatgtatgctgttggggtaggaaaagccattgaggaggaactacaagagattgcctctgagcccacaaacaagcatctcttctatgccgaagacttcagcacaatggatgagataagtgaaaaactcaagaaaggcatctgtgaagctctagaagactccgatggaagacaggactctccagcaggggaactgccaaaaacggtccaacagccaacagaatctgagccagtcaccataaatatccaagacctactttcctgttctaattttgcagtgcaacacagatatctgtttgaagaagacaatcttttacggtctacacaaaagctttcccattcaacaaaaccttcaggaagccctttggaagaaaaacacgatcaatgcaaatgtgaaaaccttataatgttccagaaccttgcaaacgaagaagtaagaaaattaacacagcgcttagaagaaatgacacagagaatggaagccctggaaaatcgcctgagatacagatgaagattagaaatcgcgacacatttgtagtcattgtatcacggattacaatgaacgcagtgcagagccccaaagctcaggctattgttaaatcaataatgttgtgaagtaaaacaatcagtactgagaaacctggtttgccacagaacaaagacaagaagtatacactaacttgtataaatttatctaggaaaaaaatccttcagaattctaagatgaatttaccaggtgagaatgaataagctatgcaaggtattttgtaatatactgtggacacaacttgcttctgcctcatcctgccttagtgtgcaatctcatttgactatacgataaagtttgcacagtcttacttctgtagaacactggccataggaaatgctgtttttttgtattggactttaccttgatatatgtatatggatgtatgcataaaatcataggacatatgtacttgtggaacaagttggattttttatacaatattaaaattcaccacttcagag

SEQ ID NO: 640 - DNA, 2717 bp, Homo sapiens
  Genbank Accession No. U72649
cagggtaacgctgtcttgtggacccgcacttcccacccgagacctctcactgagcccgagccgcgcgcgacatgagccacgggaagggaaccgacatgctcccggagatcgccgccgccgtgggcttcctctccagcctcctgaggacccggggctgcgtgagcgagcagaggcttaaggtcttcagcggggcgctccaggaggcactcacagagcactacaaacaccactggtttcccgaaaagccgtccaagggctccggctaccgctgcattcgcatcaaccacaagatggaccccatcatcagcagggtggccagccagatcggactcagccagccccagctgcaccagctgctgcccagcgagctgaccctgtgggtggacccctatgaggtgtcctaccgcattggggaggacggctccatctgcgtcttgtacgaggaggccccactggccgcctcctgtgggctcctcacctgcaagaaccaagtgctgctgggccggagcagcccctccaagaactacgtgatggcagtctccagctaggcccttccgcccccgccctgggcgccgccgtgctcatgctgccgtgacaacaggccaccacatacctcaacctggggaactgtatttttaaatgaagagctatttatatatattatttttttttaagaaaggaggaaaagaaaccaaaagttttttttaagaaaaaaaatccttcaagggagctgcttggaagtggcctccccaggtgcctttggagagaactgttgcgtgcttgagtctgtgagccagtgtctgcctataggagggggagctgttagggggtagacctagccaaggagaagtgggagacgtttggctagcaccccaggaagatgtgagagggagcaagcaaggttagcaactgtgaacagagaggtcgggatttgccctgggggaggaagagaggccaagttcagagctctctgtctcccccagccagacacctgcatccctggctcctctattactcaggggcattcatgcctggacttaaacaatactatgttatcttttcttttatttttctaatgaggtcctgggcagagagtgaaaaggcctctcctgattcctactgtcctaagctgcttttcttgaaatcatgacttgtttctaattctaccctcaggggcctgtagatgttgctttccagccaggaatctaaagctttgggttttctgagggggggaggagggaactggaggttattggggttaggatggaagggaactctgcacaaaacctttgctttgctagtgctgctttgtgtgtatgtgtggcaaataatttgggggtgatttgcaatgaaattttgggacccaaagagtatccactggggatgttttttggccaaaactcttccttttggaaccacatgaaagtcttgatgctgctgccatgatccctttgagaggtggctcaaaagctacagggaactccaggtcctttattactgccttcttttcaaaagcacaactctcctctaaccctcccctcccccttcccttctggtcgggtcatagagctaccgtattttctaggacaagagttctcagtcactgtgcaatatgccccctgggtcccaggagggtctggaggaaaactggctatcagaacctcctgatgccctggtgggcttagggaaccatctctcctgctctccttgggatgatggctggctagtcagccttgcatgtattccttggctgaatgggagagtgccccatgttctgcaagactacttggtattcttgtagggccgacactaaataaaagccaaaccttgggcactgttttttctccctggtgctcagagcacctgtgggaaaggttgctgtctgtctcagtacaatccaaatttgtcgtagacttgtgcaatatatactgttgtgggttggagaaaagtggaaagctacactgggaagaaactcccttccttcaatttctcagtgacattgatgaggggtcctcaaaagacctcgagtttcccaaaccgaatcaccttaagaaggacagggctagggcatttggccaggatggccaccctcctgctgttgccccttagtgaggaatcttcaccccacttcctctacccccaggttctcctccccacagccagtcccctttcctggatttctaaactgctcaattttgactcaaaggtgctatttaccaaacactctccctacccattcctgccagctctgcctccttttcaactctccacattttgtattgccttcccagacctgcttccagtctttattgctttaaagttcactttgggcccacagacccaagagctaattttctggtttgtgggttgaaacaaagctgtgaatcactgcaggctgtgttcttgcatcttgtctgcaaacaggtccctgcctttttagaagcagcctcatggtctcatgcttaatcttgtctctcttctcttctttatgatgttcactttaaaaacaacaaaacccctgagctggactgttgagcaggcctgtctctcctattaagtaaaaataaatagtagtagtatgtttgtaagctattctgacagaaaagacaaaggttactaattgtatgatagtgtttttatatggaagaatgtacagcttatggacaaatgtacacctttttgttactttaataaaaatgtagtaggataaaaaaaaa

SEQ ID NO: 641 - DNA, 1366 bp, Homo sapiens
  Genbank Accession No. U75272
cgcagaactcagagctgctcttcctctgtggccagttggggaccagcatcatgaagtggatggtggtggtcttggtctgcctccagctcttggaggcagcagtggtcaaagtgcccctgaagaaatttaagtctatccgtgagaccatgaaggagaagggcttgctgggggagttcctgaggacccacaagtatgatcctgcttggaagtaccgctttggtgacctcagcgtgacctacgagcccatggcctacatggatgctgcctactttggtgagatcagcatcgggactccaccccagaacttcctggtcctttttgacaccggctcctccaacttgtgggtgccctctgtctactgccagagccaggcctgcaccagtcactcccgcttcaaccccagcgagtcgtccacctactccaccaatgggcagaccttctccctgcagtatggcagtggcagcctcaccggcttctttggctatgacaccctgactgtccagagcatccaggtccccaaccaggagttcggcttgagtgagaatgagcctggtaccaacttcgtctatgcgcagtttgatggcatcatgggcctggcctaccctgctctgtccgtggatgaggccaccacagctatgcagggcatggtgcaggagggcgccctcaccagccccgtcttcagcgtctacctcagcaaccagcagggctccagcgggggagcggttgtctttgggggtgtggatagcagcctgtacacggggcagatctactgggcgcctgtcacccaggaactctactggcagattggcattgaagagttcctcatcggcggccaggcctccggctggtgttctgagggttgccaggccatcgtggacacaggcacctctctgctaactgtgccccagcagtacatgagtgctcttctgcaggccacaggggcccaggaggatgagtatggacagtttctcgtgaactgtaacagcattcagaatctgcccagcttgaccttcatcatcaatggtgtggagttccctctgccaccttcctcctatatcctcagtaacaacggctactgcaccgtgggagtcgagcccacctacctgtcctcccagaacggccagcccctgtggatcctcggggatgtcttcctcaggtcctactattccgtctacgacttgggcaacaacagagtaggctttgccactgccgcctagacttgctgcctcgacacgtgggctcccctcttcctcttgaccctgcaccctcctagggcattgtatctgtctttccactctggattcagccttctttttctggactctggactttctctaataataaatagttcttctaaaaaaaaaaa

SEQ ID NO: 642 - DNA, 2685 bp, Homo sapiens
  Genbank Accession No. U78294
caggcgtgtcccagggggagccccgctctgcagccctgtgcgccgtagagagctggacttaggctggcagcatggccgagttcagggtcagggtgtccaccggagaagccttcggggctggcacatgggacaaagtgtctgtcagcatcgtggggacccggggagagagccccccactgcccctggacaatctcggcaaggagttcactgcgggcgctgaggaggacttccaggtgacgctcccggaggacgtaggccgagtgctgctgctgcgcgtgcacaaggcgcccccagtgctgcccctgctggggcccctggccccggatgcctggttctgccgctggttccagctgacaccgccgcggggcggccacctcctcttcccctgctaccagtggctggagggggcggggaccctggtgctgcaggagggtacagccaaggtgtcctgggcagaccaccaccctgtgctccagcaacagcgccaggaggagcttcaggcccggcaggagatgtaccagtggaaggcttacaacccaggttggcctcactgcctggatgaaaagacagtggaagacttggagctcaatatcaaatactccacagccaagaatgccaacttttatctacaagctggctctgcttttgcagagatgaaaatcaaggggttgctggaccgcaaggggctctggaggagtctgaatgagatgaaaaggatcttcaacttccggaggaccccagcagctgagcacgcatttgagcactggcaggaggatgccttcttcgcctcccagttcctgaatggtctcaaccctgtcctgatccgccgctgtcactacctcccaaagaacttccccgtcactgatgccatggtggcctcattgttgggtcctgggaccagcttgcaggctgagctagagaagggctccctgttcttggtggatcacggcatcctctctggcatccagaccaatgtcattaatgggaagccgcagttctctgcggccccaatgaccctgctataccagagcccaggctgcgggccgctgctgcctctcgccatccagctcagccagacccccggcccaaacagccccatcttcctgcccactgatgacaagtgggactggttgctggccaagacctgggtgcgcaatgccgagttctccttccatgaggccctcacgcacctgctgcactcacatctgctgcctgaggtcttcaccctggctaccctgcgtcagctgccccactgccaccctctcttcaagctgctgatcccgcacacccgatacaccctgcacatcaacacactcgcccgggagctgcttatcgtgccagggcaggtggtggacaggtccacaggcatcggcattgaaggcttctctgagttgatacagaggaacatgaagcagctgaactattctctcctgtgtctgcctgaggatatccggacccgaggagttgaagacatcccaggctactactaccgtgatgatgggatgcagatttggggtgcagtggaacgctttgtctctgaaatcatcggtatctactacccaagtgatgagtctgtccaagatgacagagagctccaggcctgggtcagagagatcttctccaagggcttcctaaaccaggagagctcaggtatcccttcctcactggagacccgggaagccctggtgcagtatgtcaccatggtgatattcacctgctcagccaagcatgcggctgtcagtgcagggcagtttgactcctgtgcttggatgcccaacctgccacccagcatgcagctgccaccacccacctccaaaggcctggcaacatgcgagggcttcatagccaccctcccacctgtcaatgccacatgtgatgtcatccttgctctctggttgctgagcaaggagcctggagaccaaaggcccctgggcacctatccggatgagcacttcacagaggaggcccctcggcggagcatcgccaccttccagagccgcctggcccagatctcgaggggcatccaggagcggaaccggggcctggtgctgccctacacctacctagaccctcccctcatcgagaacagcgtctccatctaaatcccaggggaacacaggcccagatgacatccctttgaccacatcgctctaggataactggcacccagagaaaaggactcctcagaaaaaacaggcccccatgtgcctctcctgggacaaccagactctgtaactcacccccaccaccatacacacacacaaaaacagaaacaaaatcaaaacagagaaagcagaaaatctaccaagaacagagtctcaggacagaaccactgagtcttttggaggctccaagcctcaaagtgcccgcagagcccaccttgagggttttgctagttggttttgttttgcgtttacagccgtggggggaagcacataatcccgccccagggcccactagcatccactgattggaccttatggtcacccaactcaaggacagccaccaagaagtggctgccaaagagactgggcgcagtggctcatgcccataatcccagcactttgggagatggaggcgggaaaatcatttgaggtcagaagttcaaggccagcctggacgacatagcgagactccacctctaccaaaaaataaaaattaaaaaacaaaaaaaaaaaaaaaaaa

SEQ ID NO: 643 - DNA, 1192 bp, Homo sapiens
  Genbank Accession No. U85625
cggcgactgaccgtggtcgtgggcggacggcggcttgcagcgtggaggagctggggtcgctgtgggtcgcgaagcagagcccgggacgtgcgcgcttggtgcacgatcctgaaggggagctccgaggggcccgggtcgccagggctgctgcggccattcccggagcccggcgcggggcccgcgagatactggtttaggccgtcccagggctccgggcgcacccggtggccgctgctgcagcggagggagcgcggcggcgcgggggctcggagacagcgtttctcccggaagtcttcctcgggcagcaggtgggaagtgggagccggagcggcagctggcagcgttctctccgcaggtcggcaccatgcgccctgcagccctgcgcggggccctgctgggctgcctctgcctggcgttgctttgcctgggcggtgcggacaagcgcctgcgtgacaaccatgagtggaaaaaactaattatggttcagcactggcctgagacagtatgcgagaaaattcaaaacgactgtagagaccctccggattactggacaatacatggactatggcccgataaaagtgaaggatgtaatagatcgtggcccttcaatttagaagagattaaggatcttttgccagaaatgagggcatactggcctgacgtaattcactcgtttcccaatcgcagccgcttctggaagcatgagtgggaaaagcatgggacctgcgccgcccaggtggatgcgctcaactcccagaagaagtactttggcagaagcctggaactctacagggagctggacctcaacagtgtgcttctaaaattggggataaaaccatccatcaattactaccaagttgcagattttaaagatgcccttgccagagtatatggagtgatacccaaaatccagtgccttccaccaagccaggatgaggaagtacagacaattggtcagatagaactgtgcctcactaagcaagaccagcagctgcaaaactgcaccgagccgggggagcagccgtcccccaagcaggaagtctggctggcaaatggggccgccgagagccggggtctgagagtctgtgaagatggcccagtcttctatcccccacctaaaaagaccaagcattgatgcccaagttttggaaatattctgttttaaaaagcaagagaaattcacaaactgcag

SEQ ID NO: 644 - DNA, 3452 bp, Homo sapiens
  Genbank Accession No. U90552
ctgaagcttgcatgcctgcaggtcgacccacgcgtccgcggacgcgtgggcggacgcgtgggtttttcctttcttccagaaggagatttaaccatagtagaaagaatggagaactattaactgccttccttctgtgggctgtgattttcagaggggaatgctaagaggtgattttcaatgttgggactcaaaggtgaagacactgaaggacagaatttttggcagaggaaagatcttcttcggtcaccatacttgagttagctctagggaagtggaggtttccatttggaattctatagcttcttccaggtcatagtgtctgccccccaccttccagtatctcctgatatgcagcatgaatgaaaatggcaagtttcctggccttccttctgctcaactttcgtgtctgcctccttttgcttcagctgctcatgcctcactcagctcagttttctgtgcttggaccctctgggcccatcctggccatggtgggtgaagacgctgatctgccctgtcacctgttcccgaccatgagtgcagagaccatggagctgaagtgggtgagttccagcctaaggcaggtggtgaacgtgtatgcagatggaaaggaagtggaagacaggcagagtgcaccgtatcgagggagaacttcgattctgcgggatggcatcactgcagggaaggctgctctccgaatacacaacgtcacagcctctgacagtggaaagtacttgtgttatttccaagatggtgacttctatgaaaaagccctggtggagctgaaggttgcagcactgggttctgatcttcacgttgatgtgaagggttacaaggatggagggatccatctggagtgcaggtccactggctggtacccccaaccccaaatacagtggagcaacaacaagggagagaacatcccgactgtggaagcacctgtggttgcagacggagtgggcctgtatgcagtagcagcatctgtgatcatgagaggcagctctggggagggtgtatcctgtaccatcagaagttccctcctcggcctggaaaagacagccagcatttccatcgcagaccccttcttcaggagcgcccagaggtggatcgccgccctggcacggaccctgcctgtcttgctgctgcttcttgggggagccggttacttcctgtggcaacagcaggaggaaaaaaagactcagttcagaaagaaaaagagagagcaagagttgagagaaatggcatggagcacaatgaagcaagaacaaagcacaagagtgaagctcctggaggaactcagatggagaagtatccagtatgcatctcggggagagagacattcagcctataatgaatggaaaaaggccctcttcaagcctgcggatgtgattctggatccaaaaacagcaaaccccatcctccttgtttctgaggaccagaggagtgtgcagcgtgccaaggagccccaggatctgccagacaaccctgagagatttaattggcattattgtgttctcggctgtgagagcttcatatcagggagacattactgggaggtggaggtaggggacaggaaagagtggcatataggggtgtgcagtaagaatgtgcagagaaaaggctgggtcaaaatgacacctgagaatggattctggactatggggctgactgatgggaataagtatcggactctaactgagcccagaaccaacctgaaacttcctaagccccctaagaaagtgggggtcttcctggactatgagactggagatatctcattctacaatgctgtggatggatcgcatattcatactttcctggacgtctccttctctgaggctctatatcctgttttcagaattttgaccttggagcccacggccctgagtatttgtccagcgtgaaaagaagaagagagttcctccaattctgaccgagtgctgatcattccctagagacaccagtaaccccgggcttagctaacgaaagtggggagcctcaggctgaagtaacttttctctgcttctccctgcccagctcagagctgagggcctccccctccacagcaaccaatcacaaccataaagctacaagcacgcactgaagcactttactgatactcattcaattattcatatgacagttgtttgagtttggtaccatcttattttccccttatacagataaggaaactggggtgcagaaaagtgaattgactacaaagtagacatgactagttaacaacacagctgggatctaaacagcaataactaacattaatggagaacttaaaatgctctgagtgctgtgttatgagctttggtggatgtcactcctttaatcctcgcaacaccctgtcgggtagtctcatttagcaagtatggaagttgaggcagggcaacattaagcaacttacataactcatgcagtaatttctgcagttgggagatgttcagcttcagtccccggccctatggccgttcttttccaccctgtttcttcccccataggaagaacccacctgtagccctgaggttcttttcccaggatggctccaggataaggatcactgtaggtggttgtggagttgacacccctgttgactccttcccagctgattgtcagagccttagacccagcacgccttggattagctttgcagagtgtcttggttgagagaataacctcaccgtacccacatgacacgtgatttggaaagagactagaggccacacttgataaatcatggggaacagatgtgttccacccaacaaatgtgataagtgatcatgcagccagagccagccttccttcaatcaaggtttccaggcagagcaaataccctagagattttctgtgatataggaaatttggatgaagggagctagaagaaatacagggatttttttttttttttaagatggagtcttactctgttgctaggctggagtgcagtggtgcgatctcagctccctgcaacctccacctcctgggttcaaacaattctcctgcctcagcctcccgagtactgggaatataggtgcacgccaccacacccaacaaatttttgtacttttagtacagatgagggttcactatgttggccaggatggtctcgatctcttgacctcatgatccacccacctcggtctcccaaagtgctgggattacaggcttgagccaccgggtgaccggcttacagggatatttttaatcccgttatggactctgtctccaggagaggggtctatccacccctgctcattggtggatgttaaaccaatattcctttcaactgctgcctgctagggaaaaactactcctcattatcatcattattattgctctccactgtatcccctctacctggcatgtgcttgtcaagttctagttgttcaataaatttgttaataatgctgaaaaaaaaaaaaaaaaaaaaaaaaaaaaaaaaaaaa

SEQ ID NO: 645 - DNA, 1909 bp, Homo sapiens
  Genbank Accession No. U91903
  unsure (1)..(1900): n = a or c or g or t
cggagacggcggagcgggccttgttggcgtccactgcgcggntgcaccctgccccatcctgccgggatcatggtctgcggcagcccgggagggatgctgctgctgcgggccgggctgcttgccctggctgctctctgcctgctccgggtgcccggggctcgggctgcagcctgtgagcccgtccgcatccccctgtgcaagtccctgccctggaacatgactaagatgcccaaccacctgcaccacagcactcaggacaacgccatcctggccatcgagcagttcgaaggtctgctgggcacccactgcagccccgatctgctcttcttcctctgtgccatgtacgcgcccatctgcaccattgacttccagcacgagcccatcaagccctgtaagtctgtgtgcgagcgggcccggcagggctgtgagcccatactcatcaagtaccgccactcgtggccggagaacctggcctgcgaggagctgccagtgtacgacaggggcgtgtgcatctctcccgaggccatcgttactgcggacggagctgattttcctatggattctagtaacggaaactgtagaggggcaagcagtgaacgctgtaaatgtaagcctattagagctacacagaagacctatttccggaacaattacaactatgtcattcgggctaaagttaaagagataaagactaagtgccatgatgtgactgcagtagtggaggtgaaggagattctaaagtcctctctggtaaacattccacgggacactgtcaacctctataccagctctggctgcctctgccctccacttaatgttaatgaggaatatatcatcatgggctatgaagatgaggaacgttccagattactcttggtggaaggctctatagctgagaagtggaaggatcgactcggtaaaaaagttaagcgctgggatatgaagcttcgtcatcttggactcagtaaaagtgattctagcaatagtgattccactcagagtcagaagtctggcaggaactcgaacccccggcaagcacgcaactaaatcccgaaatacaaaaagtaacacagtggacttcctattaagacttacttgcattgctggactagcaaaggaaaattgcactattgcacatcatattctattgtttactataaaaatcatgtgataactgattattacttctgtttctcttttggtttctgcttctctcttctctcaacccctttgtaatggtttgggggcagactcttaagtatattgtgagttttctatttcactaatcatgagaaaaactgttcttttgcaataataataaattaaacatgctgttaccagagcctctttgctggagtctccagatgttaatttactttctgcaccccaattgggaatgcaatattggatgaaaagagaggtttctggtattcacagaaagctagatatgccttaaaacatactctgccgatctaattacagccttatttttgtatgccttttgggcattctcctcatgcttagaaagttccaaatgtttataaaggtaaaatggcagtttgaagtcaaatgtcacataggcaaagcaatcaagcaccaggaagtgtttatgaggaaacaacacccaagatgaattatttttgagactgtcaggaagtaaaataaataggagcttaagaaagaacattttgcctgattgagaagcacaactgaaaccagtagccgctggggtgttaatggtagcattcttcttttggcaatacatttgatttgttcatgaatatattaatcagcattagagaaatgaattataactagacatctgctgttatcaccatagttttgtttaatttgcttccttttaaataaacccattggtgaaagtcccaaaaaaaaaaaaaaaaaaaaa

SEQ ID NO: 646 - DNA, 716 bp, Homo sapiens
  Genbank Accession No. U96094
agacagcctgggagggagaaggagttggagctcaagttggagacagcgaggagaaacctgccatagccagggtgtgtctttgatcctcttcaggaggtgaggacaagccagaggtccttggtgtgccctcagaaatctgcctgcagttctcaccaagccgctgtgaaaatggggataaacacccgggagctgtttctcaacttcactattgtcttgattacggttattcttatgtggctccttgtgaggtcctatcagtactgagaggccatgccatggtcctgggattgactgagatgctccggagctgcctgctctatgccctgagaccccactgctgtcattgtcacaggatgccattctccatccgagggcacctgtgacctgcactcacaatatctgctatgctgtagtgctaggattgattatgtgttctccaaagatgctgctcccaagggctgccaagtgtttgccagggaacggtagatttattccccaactcttaactgaaaatgtgttagacaagccacaaagttaaaattaaactggattcatgatgatgtaggattgttacaagcccctgatctgtctcaccacacatcccttcaacccacacggtctgcaaccaaactctaattcaacctgccagaaggaatgttagaggaagtctttgtcagcccttatagctatcatgtgaataaagttaagtcaacttc

SEQ ID NO: 647 - DNA, 159 bp, Homo sapiens
  Genbank Accession No. V00563
ccggtaaacccaccctgtacaacgtgtccctggtcatgtccgacacagctggcacctgctactgaccctgctggcctacccacaggctcggggcggctggcgcctgtgtgtgcatgcaaactaaccgtgcaacgggtgagatgtgactcataatagata

SEQ ID NO: 648 - DNA, 372 bp, Homo sapiens
  Genbank Accession No. V00594
agtcccagcgaacccgcgtgcaacctgtcccgactctagccgcctcttcagcacgccatggatcccaactgctcctgcgccgccggtgactcctgcacctgcgccggttcctgcaaatgcaaagagtgcaaatgcacttcgtgcaagaaaagctgctgctcctgctgccctgtgggctgtgccaagtgtgcccaaggctgcatctgcaaaggggcgtcggacaagtgcagctgctgcgcctgatgctgggacagccccgctcccagatgtaaagaacgcgacttccacaaacctggattttttatgtacaaccctgaccgtgaccgtttgctatattcctttttctatgaaataatgtgaatgataataaaa

SEQ ID NO: 649 - DNA, 3565 bp, Homo sapiens
  Genbank Accession No. V01512
gcagccgggcggccgcagaagcgcccaggcccgcgcgccacccctctggcgccaccgtggttgagcccgtgacgtttacactcattcataaaacgcttgttataaaagcagtggctgcggcgcctcgtactccaaccgcatctgcagcgagcaactgagaagccaagactgagccggcggccgcggcgcagcgaacgagcagtgaccgtgctcctacccagctctgcttcacagcgcccacctgtctccgcccctcggcccctcgcccggctttgcctaaccgccacgatgatgttctcgggcttcaacgcagactacgaggcgtcatcctcccgctgcagcagcgcgtccccggccggggatagcctctcttactaccactcacccgcagactccttctccagcatgggctcgcctgtcaacgcgcaggtaaggctggcttcccgtcgccgcggggccgggggcttggggtcgcggaggaggagacaccgggcgggacgctccagtagatgagtagggggctcccttgtgcctggagggaggctgccgtggccggagcggtgccggctcgggggctcgggacttgctctgagcgcacgcacgcttgccatagtaagaattggttcccccttcgggaggcaggttcgttctgagcaacctctggtctgcactccaggacggatctctgacattagctggagcagacgtgtcccaagcacaaactcgctaactagagcctggcttcttcggggaggtggcagaaagcggcaatcccccctcccccggcagcctggagcacggaggagggatgagggaggagggtgcagcgggcgggtgtgtaaggcagtttcattgataaaaagcgagttcattctggagactccggagcggcgcctgcgtcagcgcagacgtcagggatatttataacaaaccccctttcaagcaagtgatgctgaagggataacgggaacgcagcggcaggatggaagagacaggcactgcgctgcggaatgcctgggaggaaaagggggagacctttcatccaggatgagggacatttaagatgaaatgtccgtggcaggatcgtttctcttcactgctgcatgcggcactgggaactcgccccacctgtgtccggaacctgctcgctcacgtcggctttccccttctgttttgttctaggacttctgcacggacctggccgtctccagtgccaacttcattcccacggtcactgccatctcgaccagtccggacctgcagtggctggtgcagcccgccctcgtctcctctgtggccccatcgcagaccagagcccctcaccctttcggagtccccgccccctccgctggggcttactccagggctggcgttgtgaagaccatgacaggaggccgagcgcagagcattggcaggaggggcaaggtggaacaggtgaggaactctagcgtactcttcctgggaatgtgggggctgggtgggaagcagccccggagatgcaggagcccagtacagaggatgaagccactgatggggctggctgcacatccgtaactgggagccctggctccaagcccattccatcccaactcagactctgagtctcaccctaagaagtactctcatagtttcttccctaagtttcttaccgcatgctttcagactgggctcttctttgttctcttgctgaggatcttattttaaatgcaagtcacacctattctgcaactgcaggtcagaaatggtttcacagtggggtgccaggaagcagggaagctgcaggagccagttctactggggtgggtgaatggaggtgatggcagacacttttactgaatgtcggtctttttttgtgattattctagttatctccagaagaagaagagaaaaggagaatccgaagggaaaggaataagatggctgcagccaaatgccgcaaccggaggagggagctgactgatacactccaagcggtaggtactctgtgggttgctcctttttaaaacttaagggaaagttggagattgagcataagggcccttgagtaagactgtgtcttatgctttcctttatccctctgtatacaggagacagaccaactagaagatgagaagtctgctttgcagaccgagattgccaacctgctgaaggagaaggaaaaactagagttcatcctggcagctcaccgacctgcctgcaagatccctgatgacctgggcttcccagaagagatgtctgtggcttcccttgatctgactgggggcctgccagaggttgccaccccggagtctgaggaggccttcaccctgcctctcctcaatgaccctgagcccaagccctcagtggaacctgtcaagagcatcagcagcatggagctgaagaccgagccctttgatgacttcctgttcccagcatcatccaggcccagtggctctgagacagcccgctccgtgccagacatggacctatctgggtccttctatgcagcagactgggagcctctgcacagtggctccctggggatggggcccatggccacagagctggagcccctgtgcactccggtggtcacctgtactcccagctgcactgcttacacgtcttccttcgtcttcacctaccccgaggctgactccttccccagctgtgcagctgcccaccgcaagggcagcagcagcaatgagccttcctctgactcgctcagctcacccacgctgctggccctgtgagggggcagggaaggggaggcagccggcacccacaagtgccactgcccgagctggtgcattacagagaggagaaacacatcttccctagagggttcctgtagacctagggaggaccttatctgtgcgtgaaacacaccaggctgtgggcctcaaggacttgaaagcatccatgtgtggactcaagtccttacctcttccggagatgtagcaaaacgcatggagtgtgtattgttcccagtgacacttcagagagctggtagttagtagcatgttgagccaggcctgggtctgtgtctcttttctctttctccttagtcttctcatagcattaactaatctattgggttcattattggaattaacctggtgctggatattttcaaattgtatctagtgcagctgattttaacaataactactgtgttcctggcaatagtgtgttctgattagaaatgaccaatattatactaagaaaagatacgactttattttctggtagatagaaataaatagctatatccatgtactgtagtttttcttcaacatcaatgttcattgtaatgttactgatcatgcattgttgaggtggtctgaatgttctgacattaacagttttccatgaaaacgttttattgtgtttttaatttatttattaagatggattctcagatatttatatttttattttatttttttctaccttgaggtcttttgacatgtggaaagtgaatttgaatgaaaaatttaagcattgtttgcttattgttccaagacattgtcaataaaagcatttaagttgaatgcgaccaaccttgtgctcttttcattctggaagt

SEQ ID NO: 650 - DNA, 448 bp, Homo sapiens
  Genbank Accession No. W02204
  unsure (1)..(448): n = a or c or g or t
ttaaagtaaaataccattgggattcacagtttattgaaatttaataaaaattatttccaaagaatgagaatcctggggtagcgaggcaattaattaagcaattcatcttaaaagatggaatacttggaacaccttagccatcattcaatgccaaaatgtttgggtttttttcatatcacatccgtcctatcttttcatcttcagtgaatcattcctcatgtttgtaattaaagccatatttaccatcataatctgcagtcacccgagctcattttgctctgaagccagtgatattaagctgttctatttctaacgtgtcccttaacttgattctaagtaaaagcagcaagcagtgggtatttaatatacaaactcatcaaattccacataanacatttaaccacagntttaaaaactccagtggcctttacactagctaccntgggag

SEQ ID NO: 651 - DNA, 378 bp, Homo sapiens
  Genbank Accession No. W20486
  unsure (1)..(378): n = a or c or g or t
tcaagcaaacggatgattttaatgaggggtgagaagcactccgcagtgcggcaagcggcgggctnggntcggggcccagcaccggtgggagcggggcttctctggcctcgcgcgcgggggacgngccctttcccctccggggaacgcgcaggaggcaccgcggccccngggttggaacaaacgcgtttactgcaggcaaggcggcgggcncggggcggcttcaccaggcgaagaggggcttgcgtcctccttggagaagctccgcacaggcagttgaagcagcagcagcaagtcgcccaggaacttggggggcaccacgtcgatgaccagcttgcgcacgcggcccgggcttgctgtgcaagggggttggcgcgcagg

SEQ ID NO: 652 - DNA, 687 bp, Homo sapiens
  Genbank Accession No. W28214
  unsure (1)..(687): n = a or c or g or t
ttttcangagctggccctttcaactcagtttaggggcgcagccagctcncttcccaatagggctctttctgctttccctctccttggccctagatttgtaatccatgaaaaagcacaaggtcctggctccttgcggtcacattctggttctctgtgtttggtggactctgctctcactgttcacccagcactagcagtaccagatggttctgtggagtcctggggaatggagagagcacagtctgactccctgccaagtagccaggagttgacttgcccatggtccgctggctttcccaccacttcctacaggatgggatctaagagactcaagagctgggtttctttcagnactctgtactgtcccaaatagnaaacaantcacttngtggccagatttctgaatggaaatgagaaattgaattcagcttgggacttaaccaggctgactngntaggggggnnnnncannnnnnnnntngntcaannnnnnnnnnnnnnnnnnnnnnnnnnnnnnnnnnnnnnnnnnnnnnnnnnnnnnnnnnnnnnnnnnnnnnnnnnnnnnnnnnnnnnnnnnnnnnnnnnnnnnnnnnnnnnnnnnnnnnnnnnnnnnnnnnnnnnnnnnnnnnnnnnnnnnnnnnnnnnnnnnnnnnnnnnnnnnnnnnnnnnnnnnnnnnnnnnnnnnnnn

SEQ ID NO: 653 - DNA, 870 bp, Homo sapiens
  Genbank Accession No. W28548
  unsure (1)..(870): n = a or c or g or t
tctcacacattcacgcatccagtcatccactcagaggccaaccagtcacacattcactcactcacaaaaacacaggttgggatgaccatcatgtgccagcggcataggttggggataaccctgagttcctggtgcagaaaataagattctcagtttttgaccttggattgagaaggacctatgaaatcaagatagacctggagaatcctccctgtccccacccactcaggcacactcagctcaaccaagagggaggcccaaaccccagtgaagcccaaggggcagagccaagctgtggatatgtcagagtttcttgggcatcttctctgctgcctgcctctttccaatcttggttcagatcagggaagcaggaagtatgggaagatccctgcatggccccttgagggcatcctaatgggacggaattggggagtttcttatattttcatgaaatatcctatttngggctcctngtgttggtggaacttgagtgattctgnagggcaggagcctccagtgangagttggnagggatcttggaaaactggntttnattttatttgggtgggtcggaattcagttgggcttaaccaggntgacttgcaaaggggggnnnnncnnnnnnnnnnnncnnnnnnnnnnnnnnnnnnnnnnnnnnnnnnnnnnnnnnnnnnnnnnnnnnnnnnnnnnnnnnnnnnnnnnnnnnnnnnnnnnnnnnnnnnnnnnnnnnnnnnnnnnnnnnnnnnnnnnnnnnnnnnnnnnnnnnnnnnnnnnnnnnnnnnnnnnnnnnnnnnnnnnnnnnnnnnnnnnnnnnnnnnnnnnnnnnnnnnnnnnnnnnnnnnnnnnnnnnnnnnnnnnnnnnnnnnnccc

SEQ ID NO: 654 - DNA, 296 bp, Homo sapiens
  Genbank Accession No. W31470
  unsure (1)..(296): n = a or c or g or t
cgggcgcagagggcgtttattnggacctgtccttcccagccgctgcttgtccaggttcagcgctctccgcgggtgaggcaaggaanncgnngagacgcncgagccggtcaccacaaggtccgcctggaccccggccgtcacggacgtacctactggatgcagatggtccagggatctgggggtcctgggagagtggtgtgtggactgcgggcccagctggacaaaggcaggggcttcctcagaagctctgctggtcacgcaggcgtccggcccacggctttcaacagccctgcaag

SEQ ID NO: 655 - DNA, 353 bp, Homo sapiens
  Genbank Accession No. W33172
  unsure (1)..(353): n = a or c or g or t
tttttttagattggtagaggtggtttatgtgccccatagccaagagaggtgtgcaccaaggaggatatcatcaaatctgacaatctggaaagcctttgaaactgttcttttcctaagcacagtattcagctgtgtcctcttgaacccatatctatcaggtcaacagctttagcccattccacatgatattggctgtgggtttgtcatatatagctcttattattttgagaaaccgttctatcaatacctagtttattgagagtttttaagcatgaaagggccttttgaaatttttggtcgnacgggccttttcctggcaatcctatttgagnataaatccaagccgggttttt

SEQ ID NO: 656 - DNA, 437 bp, Homo sapiens
  Genbank Accession No. W33179
ttttttttttattttcataacttgcttctgttgattttttttttttgtaaaactttcccaagacattttcagacttaaaaataaagtcagtgttacaggtgctggtcagccttcttacttgtacctcaaacactgggataaaggaggcggtccagggcaatgcagtgatgtctgtcaagacattccccctcccctaaactcagtagcagttgaggatgacatttcaggctagagagacccaaaatacctctgttccacctgagagcaaggtggaagttgcatcagctactgccccaagtgagcttcatcttctgattgtgggctttggaggaacgagagaactggctcttgggcactgtggaggggtacagctttgccactcaaatataccttattgtgggcattcagggagccagggtccagagctgcagggctgc

SEQ ID NO: 657 - DNA, 383 bp, Homo sapiens
  Genbank Accession No. W37778
  unsure (1)..(383): n = a or c or g or t
agaggttttttattcggccgggagcatcagcagactcgcatcttaagagccgagctccccgaaaaagaaattcctagccctttgaaggnttgacaactctaaggggtctacgtgaaagagtcataatagatcaagtaagtgtgaggaatgtgactgtgggctacctacatcagctaacagtacaaaaagttttacagtgctttctcacacaatgtctggaatttacagataacaccagtangttttggtcaggggttaatattattatcattctaaccaccagggccaggtggtggcgccaaggtcgtctagctatttatctttcttctgtttctttccaactttttgctttctcccttttctcctgtcttataaactaggga

SEQ ID NO: 658 - DNA, 383 bp, Homo sapiens
  Genbank Accession No. W42778
gaaaacaaaaatttattgcttctccttccaaagctttgtgaatttacaaaaaaaaggatgaaagtttacaaactgcttagttccaactaagcataagaggtgagaacgtacactgcagggccaccagcagcagctgtgcactcgatcgttaaaactggctcccccagacttgtagtgctgtcttcagggggctgcattccttacacgccacctcttgtgacataggtcattggtcaagccgctggaatgctacagaggtttttttggttttgagaggcttttttttgttttgccttcctactataaaagcgaaattttcagttcatttctgaaaaataaattggtcaataaattcattttgttctgcttctactttacacaaa

SEQ ID NO: 659 - DNA, 476 bp, Homo sapiens
  Genbank Accession No. W44760
ttttttctggtaacagcatgtttaatttattattattgcaaaagaacagtttttctcatgattagtgaaatagaaaactcacaatatacttaagagtctgcccccaaaccattacaaaggggttgagagaagagagaagcagaaaccaaaagagaaacagaagtaataatcagttatcacatgatttttatagtaaacaatagaatatgatgtgcaatagtgcaattttcctttgctagtccagcaatgcaagtaagtcttaataggaagtccactgtgttactttttgtatttcgggatttagttgcgtgcttgccgggggttcgagttcctgccagacttctgactctgagtggaatcactattgctagaatcacttttactgagtccaagatgacgaagcttcatatcccagcgcttaacttttttaccgagtcgatccttccacttctcagctatagagccttccaccaaga

SEQ ID NO: 660 - DNA, 402 bp, Homo sapiens
  Genbank Accession No. W45531
tttttttttttttgaaatttgataaatgtttattgacttgctgattcaaaaaaacagtgtagctgagaagtctgatcagctcagaaaagagtggaatttggcaacaaatatgttatccaacaaaatctgagtaatttatcaccttttaacatcttcaacatatttataatataaatattttttaaaaaaccgattattaaactaatactcccctggaagaacaagaggactaattttcggtgacgacagacttgtgctgatccatcatctggaactcctaaagacctgaatggctgactgggattagtgactactatctggttttactggttttactctactaagcccatgattttgtggttttaaccaattaagaaaattatccccaagcacaataaaaat

SEQ ID NO: 661 - DNA, 534 bp, Homo sapiens
  Genbank Accession No. W45664
  unsure (1)..(534): n = a or c or g or t
ttttttcctaaagtcatttattttcttcgagaactctggacattccataactgggtgtgtagtatgagtagaatgaattcagtgctagcctcttgctggagagggacaagtgcaggtttagaattacagcttatgttagaaggttctcttctcatcgataccttcatgttagaagaaagaggacagaggcagagctgatggaatctcataaaataacagctaatgccgtgtgtcaggcactatgcttaacaagtatctgtttaacatgtgtaaatgctctttagctcttgcttttctataatataaaacagtcctgggagtcctgttcttccccttcctttctctcgtgtcctttggactgtcttttngcagcctctggcctttctcattatctactacagcttgctacctgactcatcaaaggcacatgggtgttgcaagagaggatgggaacccggtggtttataccattaaactggccattataacagggagctataaggtggaaaaataggagnccaggaaataaagccg

SEQ ID NO: 662 - DNA, 444 bp, Homo sapiens
  Genbank Accession No. W46395
  unsure (1)..(444): n = a or c or g or t
ttttttgcacttcgcccacacaggacagtggagccccacctggtcagttccacttccgggctcccatgcacttgcccaaggcggcctctttgggacggggatggtttgaggaaacacttttaaagaaaaaaggaagacattgaaaggttttagtttcttccctatctgcatgtcctctcatatagaaagcccagaattaggggctagaactccaggagagggtctccccgactcatctcttgctgacggtcaccaggatgcagaaatagggagatggttagtgggggccaaagatgccccctcccaggccttcgtggttccctcctccgccccctgcaatctttgggaggagtcagtgcctcactccagcagtgagtgcctactgtatgcaggtagtcagccaggcaaagagagactaacggtctcatgggggaacctcttgan

SEQ ID NO: 663 - DNA, 489 bp, Homo sapiens
  Genbank Accession No. W49708
ttttttcaccgcagagatgtttttattgaaatgcatgttatgagtaacacatgaactccctctggcccaggtgggacttcttccctcataggtgggtcaggcccagtgggacagtcttggtggtggtaagaagggagccaagtgacagaaggtctccaaggcataggagatggtgtccggtgagtctggggaaccgaggattatgaagcctgctggaagccttggtatggtatggttcttctcagctgtggctgcagatttctcttcattggctgcctcctctgaaaacagactcctcttttctgcaattaatcttttaactcctaccatccactgacttgacctcagtcacatggtcaaccatgagggagcggtggatgtcatctgctgcgtcccaccggtggcttgaaaagctcttgcaccagtagagccattctcttctttacagggtattgacaactttcctccaagcccactgttccttgcaag

SEQ ID NO: 664 - DNA, 678 bp, Homo sapiens
  Genbank Accession No. W51743
  unsure (1)..(678): n = a or c or g or t
cacaaaaaaaaaatcactaaaaattcccacaaatcttgtttctggcactttagaaaaactgcaaaaaaatacgtaataaagaatacatatatatatatctacacacaaattatatatctatctatctatacagcggaaccacaagagagactgaggaaggcctggaggcaggggcagaggtgacgacagtgcccctatatccttaacccatactcctctgaggcaaacaggcatgggaaaatggaagggttgaggatggaccggagaattggaacttcagaataggtcaaaattccaaaaccatggacatttttttttgggagaattgagattgtagacattttttttttcttaaatatgatcaaggaaaatagcttccagaatgtggtggttctgggcaacaaatgagattgtggcgacgtggagattaaaatatatgtatttgagctggggaatttgaatattgtgagtttcagatgttggaaatttgggattttgcagttttgtcttttgaaaatgatcaagtcttgtcagttcgtgccctctttccccatgttccctgggaagacgggtggtggcagagtgagaaggccactggtctgtgccgcacacgcaaaatttagaatctccagctagctctatcgtgtgaggnccagattagggaantgccatattacc

SEQ ID NO: 665 - DNA, 453 bp, Homo sapiens
  Genbank Accession No. W52065
  unsure (1)..(453): n = a or c or g or t
ttttttttttttttttcagaggtcaaatcacttttattctttaaggattcagtgtaacatccttttctttaataaaataattaaacactggcagaaattaacttattcaaaaagtcatactaatactttgttatgactttttatagaaaaacaaactttatttttttatttttttgagatggagtcttgctctgtcacctaggctggagcgcaatggcacgatctcagctcactgtagcctccacctcccaggttcaagcgattcccctgccttagcctcccgagtagctggaattacaggtgtgcgctaccatgcctgggctaatttttgtatttttagtagagatggggtttcaccatgttgggaaggctggtttcgaactcctgacctcaggtggattcacccgccttggcctcccaaagtggctgggattataggcgtgacagcctgna

SEQ ID NO: 666 - DNA, 466 bp, Homo sapiens
  Genbank Accession No. W52638
  unsure (1)..(466): n = a or c or g or t
ctcagtttgggaccaaactgcttggatctttgtaaaaacccggttttgtatgtcaaggaggagtttaaggcctttccgaccaccttgtgttccccttttctgcgcaccatgtatcacgtggagttgctccttaccacacctcacgtgcccctgagccctatttcctgatttcttctgggctggacttccccgttctccaccagcagctccagtatcccaaactttctagtcctgctgatcctcccagcaacggggtggaaactggagggcagtgtctggtctgttttctaagaaacttatgaattctattatctttacaaatatgagaaaattttttcaatattttttattaatctttttataaaatgaaaagaaactcctatgatcgattaaggaaggtggttatggctgggtggttcaggggtttttttgggtttcntttttttttttcnttgtccttttaacg

SEQ ID NO: 667 - DNA, 511 bp, Homo sapiens
  Genbank Accession No. W52858
cacggccaaaatccataaagattataaaagcaaactaagttgtgaagctatagtacatgtaggcatttagttaagtatagcaattcaaactgacctgcatccatccaaaacaaattcctccttcaaccttatttttacttgaaatttgctagaagaaatagcaaacccgaaatttgttttatgcatgagttaataccactggctcagcaaatacaagttagtttgctttaagcaggtaactttttttgtaatggaacgaaatgcactacaaagttaagacagatttttgctaagtgcaggaggccctttattattgctgcagaaaacaaaagcctggctgagttgatgttttacattctcccttactgaaatctacatgacatgatgcttcttgctgggtttttgtacatggtaaacattggtcaagctgtgaaagaaaatgggctggaggtgtgctttggtgtggaaagggtgagcaataaaggtatccggttaagttccccaaaaaaaa

SEQ ID NO: 668 - DNA, 426 bp, Homo sapiens
  Genbank Accession No. W56792
catcattttttattgtaagaaaatacacagtttgaaagtgtgaataatgcaatatttatgaccaagaaatgggacttaggaaggggaaggaagataaagaaaaagatcaagatgatctgattgagagacagtgttgaactccaaatactgaactggaaaaggagggaggtggggaggaacaggaggaggaagtaaaaaaatttgatcagagaaacagttaaaatacaatatgaaaataagtaatacctctccttaaattccttctatacacaaaatacacgatttgccaaagcccaatttgtgctactgggattctgtgagctccttaagtgtattcacatcctctgcaacagcagaaaatgattatgatacaatcagaatatgctgaagacaagttaaactcttgccagcaggttccttaaaaat

SEQ ID NO: 669 - DNA, 426 bp, Homo sapiens
  Genbank Accession No. W57931
  unsure (1)..(426): n = a or c or g or t
tttttttttttttttgggaggcaggagttgctttttattgacttggaagtgggctcttcagtgaagcccctttggttntaagagcattttcctgcttcctttgttcttcctgcaacttctgctgcctgagctgccatgcttgtaatccagcgtccatttcctgtgacagcagtacaactcgtcttgcaaacgtctccctttcagcttttcttcgaagctggcctttcattgggggagcagggcggccatccgattatgaccagtctgggagctcggtaaggggcccgtaagccggangggttggcagccaagtccctgctgtantcgccactggccgcccgcccaagcggttacnttgcagtgcacccttccggacacctgtgaagagaacagtccctaaagcagccatgtgagcagcctcgtgcc

SEQ ID NO: 670 - DNA, 98 bp, Homo sapiens
  Genbank Accession No. W60186
aacttacaaacaaaaataccgtaataataaacccaaacaaagaccctcagcttgctgccacgttctctatgcggtttggcggggcgggtatttacaag

SEQ ID NO: 671 - DNA, 597 bp, Homo sapiens
  Genbank Accession No. W63793
  unsure (1)..(597): n = a or c or g or t
ggaactgagaaaacagcaaagttgactaaattttatatttcttgtcctctaaatattttgataatttctggattgatgcagtgatgtttttgttccttccgtatttataaatgaaacacctttttttagtgtttctaaacctaaaatctacttggtttgaaatcaagtggttggaacactgtttgacttttatttgaagcatgttgttgattgaaaatttcattgaggaagttttcaatcagtgtgatcagtttgattctgtaatgagcacagcacctaatattttgaggagctctgttttgaggaccaatgcttaaggtggactttgttcgtaaacaatatcccaatagatttgttgacttgaggtctggtttggttttgtttttgttttgttttgttttgttttgtttccaatagaattaagaattctaatgttgaaaaactgcacaaatttttatgggacaaagcctagaaaagagaaatgtagtttgaatcataaccaaaaccacggatgatagaagagggaaagtttggggccataatttctccttcactggtgttgacctaaaccgttggaaaggaattccggncccaatt

SEQ ID NO: 672 - DNA, 447 bp, Homo sapiens
  Genbank Accession No. W67225
ttttgtgttccaataaaattttattaacaaaatatgacagtgggggggccacagtttgccaaactttgccttggaggacatgcagaggcaccctcagaattcagtgaaaacctgctcccatattgctaagactcatgaagtataatctctcatcttctttctctttcccctgcccaagccctaagttagggttcccatccatataacaaagacttctggtcaggtggcatttgctatctctgagattccctgcccatgaaagccacaaagagatttcttcttttacacaccctgaagcatattatggccccagcaaggctaactaaatcaaactgtggtttaaaaacaaaacaaaccaaccactgtgaaatatttatttttgttttgtagtattaagcatgattaaaccagtgcagaaaaatactaagtacattgggtaaaagatga

SEQ ID NO: 673 - DNA, 411 bp, Homo sapiens
  Genbank Accession No. W67577
  unsure (1)..(411): n = a or c or g or t
ctaattactaccttttattctaatgtgaaccatgggccctggaaagctgataacaagcttggctgagcagagggaactaggggtcaggcagaaaggattatgggntggaaaacattggctcttccttgggnagtggatgctngggaaaggggaagagagtggctcancctggcaggtaaataggctagaaaagccaaggccaaanctggngaggggagaggacagtcagcatgtccagcctggggtctgggtgtaagggttatcccttctccctggtgccttcccatctcgtccatgagcctaaggtcttgggagccttgtgttgggaggctgctgtgatgtcagggaacggggatctgtctagcttttggccacttcctggggacctcacacccctgtttganaaattgg

SEQ ID NO: 674 - DNA, 473 bp, Homo sapiens
  Genbank Accession No. W69302
gctttcggtggttccttggtgactgggaattgcttgtgtgcatgtgttgggtgcatgcttccgggtctcagctgccccaggcccgcacaggcaaccccttcccatccaaagccattggtggagcttctctggaatcatttgccaaaagcccaaggcagaatccaagggtccaagaccatttccatggagctcatgtttttcttttctgtaggaacttttttttaaccagcacccaccataattccgaagccacgtttcatctttcctggatcactacagtgaagtattacacgttgtacacgttcccagtctggccttggcttgctcggataaaactttgtatgtattttgtatggcatagattctatattgtaatgatgtcctatgcaaaaagagaaattaacgaaattgtaaattttattgttttaacgtgtatgcatgtttagtgacgtttacattttgaaataaaattt

SEQ ID NO: 675 - DNA, 128 bp, Homo sapiens
  Genbank Accession No. W70131
gttttttgacttcatttattatataaggaacctaactcaaattggcttaagcaattaataaatgtttattgttacattgttgtaatgtggctggaaatccagaagtcatacaaatctgtcaggattgg

SEQ ID NO: 676 - DNA, 428 bp, Homo sapiens
  Genbank Accession No. W70167
  unsure (1)..(428): n = a or c or g or t
cagttctgtcccttcgagaaaaacgtggaatcgacgaggaccttcctgcagacggtgagcagtgagaaggtccgctccactaatctcaactgctcagtgattgcggacgtgaggcatgacggctccgagccctgcgtcggacgtgctgttcggagacgggcatcgctcgattatgcgcggcgtcatctcaccgctctggaaatgctcaccgccttcgcctcccacatccgggccagggacgcggcgggcagcggggacaagccgggcgctgatactggtcgctgacagcgccaaagagaccaacaagatgattttagcgtggactaggacacttaacctaagaagagtttcacttaatcattcaaatcactatctgaagggtcacggagcgcaaaataaagtttaaaaccctgctaccaaaaaaaaan

SEQ ID NO: 677 - DNA, 359 bp, Homo sapiens
  Genbank Accession No. W73038
ttttttttttttttttaaaaatcagatggggactttattgtgatggtggcaggtccaccagcagatgcaaatgtggggtgctgagagtggcaacacaggccaccccaaaccaacttcactccctcccctgtcctcagccagtacagaagccaaatgtagccccagccctagactccagcccaggcagagtccaagggaggggtgtcagggtcagaagtcacagggagcccagtgactatcaaggtggctgagagcaaggctagggtagggatggggcagagaaagggcagggggtgcagcccaggtggcccaaagcaacacagaggagcaagggctggcattcaagtcagcaggtccct

SEQ ID NO: 678 - DNA, 620 bp, Homo sapiens
  Genbank Accession No. W73790
  unsure (1)..(620): n = a or c or g or t
ctggttgacaaagagggtatttattgagggtttactgggtacanggagaagggctggatggcttgggatgcagagagagacccttcccctgggatcctgcagctccaggcccctttgggtggggtcggggctgggaacctatgaacattctgcaggggccaccgtcttctccacggtgctcccttcgtgcatgacctggcagctgtagcttctgcgggacctccactgctcgggcgtcaggctcaggtagctgctggccgcgtacttgttgttgctctgtttggagggcgtggtcatctccacgccctgggtgatgggggtaccatctgccttccaggtcaccgtcaagattcccggataaaagtcattcatgagacacaccagtgtagccttgttggcttggagctcctcagaggacggcgggaacagagtgaccgagggggtggccttggntgacttaaaacggtgagctgggtcccgctgccaaacacatgcgtcactgagttatgcttggattgaaaccccggggccancacttggggcagtccaggagccgccttgaacaggaacctgcccaccggttcctaagcttgaccgctgnttctccagggtccaggncc

SEQ ID NO: 679 - DNA, 697 bp, Homo sapiens
  Genbank Accession No. W73859
  unsure (1)..(697): n = a or c or g or t
tggacacgctcaggctggcgtccagctacatcgcccacttgaggcagatcctggctaacgacaaatacgagaacgggtacattcacccggtcaacctgacgtggccctttatggtggccgggaaacccgagagtgacctgaaagaagtggtgaccgcgagccgcttatgtggaaccaccgcgtcctgaccttggaggtgcgagtctgggaaaggcgcgctcccggggggangcgcncnctgggaaggcgacccctgccctcagtgctctctgtctctgcttccccctcgcaatgctcctctctctgtcccaccccgcgagaacactttacaacgacgaggagattcgtttccaaaccagaggagatcaattgtacttacaaagattcccatctatttaactttattaacttctaccgtgaatgactctgcaagccttgctggtccaagtgcaatatgtaattataaatatataaatagataagagcctatcaatgtatcttttgtacaatatgttgtaaaatgtagatcataggatagctgactttgacagtcacatttataaagtaattcacttaaagatatatatttttccaacaagtttgcacttttgaaataaaccttctttatatgctaaaaaaaaaaaaaagatnggcggantttccttggggggtaattanttgatgcgcgttaangcgg

SEQ ID NO: 680 - DNA, 676 bp, Homo sapiens
  Genbank Accession No. W74533
  unsure (1)..(676): n = a or c or g or t
tttttcagttggacacaaatgtatttattttaccctagcaatagaacaaaatataatttctttagccatttttcatgagaatagttcattgtacagttgaggaaacatatgaaataaggcctgtggttgattgctagtggttaagcatgttttcaatctttgccttaatgtaaaagatttgcagtgaactgcaaactgatgcagaatatctctcctgcttttccaagtcttgtcaggaatagtaaggtacagtaaatttgtcccacaggattttaaagcctacgtcttgtatataatacaatgcaggcctacaaaaatggtgcagccatatttacaaatttagttcacagactgctgcagtaaaatggctggaaagttttgttttgcttgtttcacaatttctctaaacagcagcagaatcttaaaatacctggctggcatctcttttctttgtaacaaataattcactttagtatactctgtgtatatacaaagtttttgtatgttttataaaaattcacagaactgcaaggttcagtcacttttttacaccagagaaccacaggtcaagagcactcttcaagcagagttgagggactgcgnagccaatggtgccttattattaaacccgcatgggcctggatcctagctgagataagntgtaccacgcatgcct

SEQ ID NO: 681 - DNA, 496 bp, Homo sapiens
  Genbank Accession No. W76181
  unsure (1)..(487): n = a or c or g or t
cgaggagtcggggcaaagctgggcctgcgtgagattcgcatccacttatgtcagcgctcgcccggcagccaggggtcagggacttcattgagaaacgctacgtggagctgaagaaggcgaatcccgacctacccatcctaatccgcgaatnctccgatgtgcagcccaagctctgggcccgctacgcatttggccaagagacgaatgtccctttgaacaacttcagtgctgatcaggtaaccagagccctggagaacgttctaagtggtaaagcctgaagcctccactgaggattaagagcaacagccccagagcctgggctctgctggacttagtataatgtgaaaaaaatgtgttctcctattcctcataaagcttgtgctgtaaaatactttctcagggtgttcttgtcctcatctaccctctaccccttactgtgcaaccactgaggcaaagtagcttaatataaaaataaaactttattctggtctcaaaa

SEQ ID NO: 682 - DNA, 315 bp, Homo sapiens
  Genbank Accession No. W78127
gaaaagacgtgcttgtcattcttaataaacaactagagtaagaatacataagagaaacagagtggtatctttatatgatacacaagtgtatgttacaagaattccatcaggcacaggagcctcaggttttaaggcctcaatgttaggccaacaaaaaaaaaaaaggcatggtaaagtttttacttttacatctaaaatgtcacttgtcataaaggagggtgtaatagaaattgtctttaataaatcataattgaagttcccctcatttttcttccattaagatgctaagtttatgtctgatcatgaagaaagaaa

SEQ ID NO: 683 - DNA, 418 bp, Homo sapiens
  Genbank Accession No. W86513
  unsure (1)..(418): n = a or c or g or t
ccagtgaaactcattttattttcagctgaaaaatatacacagataagcattaaaattgaattattataggttttctgaaaataaaattttacaatacttatgtttaacaaagattaaaaaattcaaacaaatcaggaaggcacaggtcttgtaaaatgtaataaagaatttagtccataccttgatgcatagtggtggcattaaatggcacaatttttcggtatcatgcctgcctgccttagatctcaaacagacctactctcttttccttctttctcatcttaacaaacttttgataatcaagcatcatagtatgacaaagagagtaacaagagctgtgcaggccagcacatccagagagcagtactgaaaccaggtgagcttgtgggcaggtngcagcaggtacttgggctccatt

SEQ ID NO: 684 - DNA, 265 bp, Homo sapiens
  Genbank Accession No. W88568
gttttttaacattttaatttcaacgtgccagcatttgtccaaatgagatgatacaggctagaatgcacggcggaattccagactggactcactccataagccaactcatcactgcccgtgaacatgaattctggtcctcagagaagctgacattgtttccctgaacattcccgtggtctccctctgaaagccgatgaccatccaaccctgactcacctgaaatatcctacgagcatcgccctccgagactgacgattattaacca

SEQ ID NO: 685 - DNA, 395 bp, Homo sapiens
  Genbank Accession No. W92207
  unsure (1)..(395): n = a or c or g or t
gtgttccaataaaactttatttacacacattgaaacctgaatttcatacaattttcacgttaccaaattttaattttttttcaactatttaaaaatgttaaaaccattcttagctcacaggctatgcgaaanagancaaccagccagattcggcccacggtttaaggccagtttaagcctcaccaccttcctagccccactcacctattttgtcctctcatcttcctgtccttcagcacccccatgaccttcctgtgaccttcaatggcccctccagctgccgtccagccctgtctgtctgcccttnggggaccctctcctcctgggctgcaggactgttttttcctggagcaggtctctaaatagctccattcgccttggcagggggaatccag

SEQ ID NO: 686 - DNA, 241 bp, Homo sapiens
  Genbank Accession No. W92449
ttttttagattcatctttttaatgacatcctaaaattcagaggaggggccagcgggacctctgggctcagcggctgtgaaggagggacccgcaacacccgctaaggcaggtaattgcaagaaggcactcgcgagggggacttcaagcccctcttctatttcttcatataaaatcagggggatggggaaagctccaagggcgagggaagcagagagtttctctcccagcctatggaataagg

SEQ ID NO: 687 - DNA, 355 bp, Homo sapiens
  Genbank Accession No. W94333
tgaacatttcatcttttactttttagcaccaacagacttgataacagcctgatgctgatctgacaatgggttgatagccttcccccactgacccttaaatctgcttagtaacaagtcctttgcttctgtcattctcctgggggatggcctactcgccctcctttctgtacaatctgggcaaaccgactggtgatggcaagagtggtgtcaatgaagcggtctacacagctggagagacaattttcagtgcgagagtctaggcgattccctggcttctccacacatttatcccaacataactccatgaagtgatgcacctgtgcagtaaactgcgccttctgctgctcggcggcca

SEQ ID NO: 688 - DNA, 1761 bp, Homo sapiens
  Genbank Accession No. X00351
ttgccgatccgccgcccgtccacacccgccgccagctcaccatggatgatgatatcgccgcgctcgtcgtcgacaacggctccggcatgtgcaaggccggcttcgcgggcgacgatgccccccgggccgtcttcccctccatcgtggggcgccccaggcaccagggcgtgatggtgggcatgggtcagaaggattcctatgtgggcgacgaggcccagagcaagagaggcatcctcaccctgaagtaccccatcgagcacggcatcgtcaccaactgggacgacatggagaaaatctggcaccacaccttctacaatgagctgcgtgtggctcccgaggagcaccccgtgctgctgaccgaggcccccctgaaccccaaggccaaccgcgagaagatgacccagatcatgtttgagaccttcaacaccccagccatgtacgttgctatccaggctgtgctatccctgtacgcctctggccgtaccactggcatcgtgatggactccggtgacggggtcacccacactgtgcccatctacgaggggtatgccctcccccatgccatcctgcgtctggacctggctggccgggacctgactgactacctcatgaagatcctcaccgagcgcggctacagcttcaccaccacggccgagcgggaaatcgtgcgtgacattaaggagaagctgtgctacgtcgccctggacttcgagcaagagatggccacggctgcttccagctcctccctggagaagagctacgagctgcctgacggccaggtcatcaccattggcaatgagcggttccgctgccctgaggcactcttccagccttccttcctgggcatggagtcctgtggcatccacgaaactaccttcaactccatcatgaagtgtgacgtggacatccgcaaagacctgtacgccaacacagtgctgtctggcggcaccaccatgtaccctggcattgccgacaggatgcagaaggagatcactgccctggcacccagcacaatgaagatcaagatcattgctcctcctgagcgcaagtactccgtgtggatcggcggctccatcctggcctcgctgtccaccttccagcagatgtggatcagcaagcaggagtatgacgagtccggcccctccatcgtccaccgcaaatgcttctaggcggactatgacttagttgcgttacaccctttcttgacaaaacctaacttgcgcagaaaacaagatgagattggcatggctttatttgttttttttgttttgttttggttttttttttttttttggcttgactcaggatttaaaaactggaacggtgaaggtgacagcagtcggttggagcgagcatcccccaaagttcacaatgtggccgaggactttgattgcacattgttgtttttttaatagtcattccaaatatgagatgcattgttacaggaagtcccttgccatcctaaaagccaccccacttctctctaaggagaatggcccagtcctctcccaagtccacacaggggaggtgatagcattgctttcgtgtaaattatgtaatgcaaaatttttttaatcttcgccttaatacttttttattttgttttattttgaatgatgagccttcgtgcccccccttccccctttttgtcccccaacttgagatgtatgaaggcttttggtctccctgggagtgggtggaggcagccagggcttacctgtacactgacttgagaccagttgaataaaagtgcacacctta

SEQ ID NO: 689 - DNA, 3768 bp, Homo sapiens
  Genbank Accession No. X00371
cctctgacccttttggtcgctaggagtcagccgactcagtacacaggactcactgaatggagacacaaggctcctccagggagtggcggctcatggcaatcctagaatggtcaccagccaggctttagagacccacacagagggcgttctgacccaaagttgcactggggaactccaagtttggggattctttgaatttaactctttttctagctacatttcctattatttgtccaattcttaccaaacatctctgttcacattctgaagctgggatctgactggcagagctagtagatgctgactattcagatggagccctgacattggctttctcagcttggctgtgactggcagcaggtttgcgggagaactgtgtgtcccagaacatgactggctacacctgcacctcagcaagattggggcagggcagttatcttcaaaaagctgtgtaggtggggcagtcattactgacaaatccagtgcagacccaggatggcccaaacactggcttatcctttctgaatctcatctcccacagctgtaaagcggggtggtgctcgctacctcacagaggtgttgtaaagattagatgtaatcttgccaagcagccactttgtaaactgtatagtcttatgcagatggaaggaagggcctgtgcctaccttgatcatagcactaaacaaactgtactgtattttcattcctcttagttatctccctaaaaagactctgagttccttgaacacaggaaggtgttttatttgattttgttatcctcagcatgtagcagtgtctgacacacagtaggtgctctatcactgtgagagggatggatggatgggtggagttacagatggatagaaggatagatggagggatgggtggatgatggatggatagatggatggaggggggatgatgaatggagggataatgagtggatgaatgagggaatgggtggatggatggatggagggatggaggaacagatagatagatggagggatgggtgggtgatggatggatagatggatggagggagggatgatgaatggagggataatgaatggatgaatgaggggatgggtggatggatgaatggagggatgatgggtggatgaatgaattgagggatggatggatgaacacatggatggatggatagatggatagatggaggaactggtggattttggatggatgggtggatggatagatgaatgaatgcctggatagacaaagagatgatggatagatgaatagatgaattaagggatgtcggatagatggagggattgatagatgttggatggatgggtggtggatggatagatgagtgaatgcatggatagacaaagagatgatggatggatgaattaagggatgacagatggatggatggatgagtaactggatggacaagtggataaatggatagatggttgaatacctgaatggattgaaggaggatgcatggatgtaagataaggctaatcatcctccactctctttctttgcaaaaccatccacccatttactcaataaacatttattcagttcaaacttggcacaaagcaccatgtgaggcccaagagatacgtgggttaataaaacagagctcctgccctcctgaaaactgcaaagaaaggggcgtggcttcctgagttcaaatcccaactctgccagcgactagctgtacatcagtgatgtttccctactttctctcaattaaatagggataatgtcagtacctatcacattgggaggtcttgcggggattaaatgagttaccaaatgccaagtgtttgggacagggcctggcacccagcaaagtctcttgtgagtgctggctgctattatcctaatggagaagatggcatgaaaaccaggaaataggatgccctttgggaagcaatgcaacaggaacttacacaaagaaaggaaaggaggaagcaattagtggtgtctcaaaggagtatgtcaagaaaaacttttcagagggaaacctttgagcagggccatgaaaacaggagttctctaagagattgtggacttgcctgggaccacctggctataagcacaaaaccatccggttcctttctgtcacttctggcgggtgaggggtctctggcaaaggggcagaaggtgcgtgagaggttgcgaatggcaggactgtcctggccagccggggcacctggtggccaagcttagaaacatgacaggtcctcttgggagggctgaccgcagggagcgttgggtttcaggctgctggcgtcggcttctgtggtgccctttctgtcggctatgagagtccagacagtgcccaacctcctccccttctttccacacgcacaaccaccccaccccctgtggcctgagctgtcctgcctcgccacaatggcacctgccctaaaatagcttcccatgtgagggctagagaaaggaaaagattagaccctccctggatgagagagagaaagtgaaggagggcaggggagggggacagcgagccattgagcgatctttgtcaagcatcccagaaggtataaaaacgcccttgggaccaggcagcctcaaaccccagctgttggggccaggacacccagtgagcccatacttgctctttttgtcttcttcagactgcgccatggggctcagcgacggggaatggcagttggtgctgaacgtctgggggaaggtggaggctgacatcccaggccatgggcaggaagtcctcatcaggtaaaaggaagagattccattgcccctgccacccacaccctaagatcaagggtgttcagctgcaaggtggaaagtttgcacgtggggtaggtcagttggctgcattagttaagggtgttagaacggtcacttgctttttctttgcttttaagtgtcagggattggactcaggagagggaaaggagccatttcaggctgatatcagcagctggaggaagcatgagaatcaaacctaggatgctcagagtccaccaggaagaattttagaattatagacagtcagagttaacaagggtcctgagagattttgtacagccacctctcttacaggatgaggacaaaaagcgactgagaaggggaggacatttccagagtcacagctcattaaatgctcttaaagtgtcaaggttaagacatgctcttcaaggggagacagatctggttctagacttggctctgccactgagccactgggtgacctttgggaaggtactcaacctctcggagcctcaatttcctctcctgtacagtgaggggatatcctaatatctatatcctagaggagatgtgagaattaaataaaataatgcatgcaagaggcctggcatggttcctggcatatactgagtcctagaaatgttagtagctattactgatgaagcccaggctagggacctttcaaagcattgcaattagagaacagaagatagaggctcattagtgaccttcgatgttgagtatgtctctagtttgagaggtctgaatgatgtggtctgcaagtatatcctgccttctaccacaagggattccagaatacaccaaagaaaacaaaattctgaggtttgtaaatagagggtggctgtggtttgtacatagaagctcatctcctcgttgccttctatcccaaaggtgatacactcttctcttggccccttccctcaccattctgagctggttccctcagaagtctaataggttaagaatcaacgtttctgccaacgggaggaaggaagtgggcgccgg

SEQ ID NO: 690 - DNA, 803 bp, Homo sapiens
  Genbank Accession No. X02544
gcccatagtttattataaaggtgactgcaccctgcagccaccagcactgcctggctccacgtgcctcctggtctcagtatggcgctgtcctgggttcttacagtcctgagcctcctacctctgctggaagcccagatcccattgtgtgccaacctagtaccggtgcccatcaccaacgccaccctggaccagatcactggcaagtggttttatatcgcatcggcctttcgaaacgaggagtacaataagtcggttcaggagatccaagcaaccttcttttacttcacccccaacaagacagaggacacgatctttctcagagagtaccagacccgacaggaccagtgcatctataacaccacctacctgaatgtccagcgggaaaatgggaccatctccagatacgtgggaggccaagagcatttcgctcacttgctgatcctcagggacaccaagacctacatgcttgcttttgacgtgaacgatgagaagaactgggggctgtctgtctatgctgacaagccagagacgaccaaggagcaactgggagagttctacgaagctctcgactgcttgcgcattcccaagtcagatgtcgtgtacaccgattggaaaaaggataagtgtgagccactggagaagcagcacgagaaggagaggaaacaggaggagggggaatcctagcaggacacagccttggatcaggacagagacttggggccatcctgcccctccaacccgacatgtgtacctcagctttttccctcacttgcatcaataaagcttctgtgtttggaacagct

SEQ ID NO: 691 - DNA, 14646 bp, Homo sapiens
  Genbank Accession No. X03100
  unsure (1)..(14646): n = a or c or g or t
tttgatcccttaaagataacgtcccctaggaattgttccctgagccagaccctccaagaatggcagttcggctcttacctggagtggccctgccctggaccacagatgtgagcagcaccatcagtaacgccgtcagagccactgtccggggggccgcagaaacctgcagaaccatcatggagctggaaaaggatggcaaaatgaaaagagctgcagtcaggaaaagaaggactcgctaaagggagctcctgtttgaaatattagagaccatgaacccaagtagtcttctgtgaccctgggattggacagagtctgagaaaagaaccaatggacactgagctttgtatgagtcattgctcactaggcagaaagttagtatgaaaggtctgaaaatataaagcctgtgatgcacttaagatgacggaggaaagacagtgatactcattttaaccagtcagataagtcatgatgtttggggagattatgcgttttctttgctctgaaggtgatctcaaatattctgctggcccatctacagggattatcatttccccaattctgccacacctcacacacccacaggacatggtctgttgtggaaaaagtgctatcttagtgtgtaaaaggtcattcagtggcatgacttagagggattagagtacccatctcagaactcaaatgaggtctgagtctgtctgtcttgcctttgtccaagggtgtgtttaagattagcacccattcatatttactttctcccagaggtctgtgagtcctgcgatgtgcaggagttaccaggttcttccacaggactgtcatcagggtcaggagggctcagtctagggaccttacactgggagcgtggacacaccacctaccctaccatgtaaatatgcagctttaacgacactgcctctcttggacttcgattccttgtcttcaatatggggatgatataacctgccttatagcaaagctcttaagatcaaatgagatcaataggtctgaaattgctttggaaaaataaagtccatagagaatataaattgactggtaaataaggaagaaagtgaaaaaaaatcatcaaagaccccacctccttcaaagcatctgattctattttgtttagagtgaatatttttacaaactttcaaagaacattacttcttactttagacacttataaatgtgatcctgttggaccaccaattctaatttcaaaaaaaatcaaattggcatcatttctttaaatcaatattaaaatgtaaatagaaggctagcatgtaaaatgcaagagaagaaaataattatgtagtagaaggtgtctagtaggattaaggggccaggagaggattgtggagaaaaactcagtttttttagtaactgcctgggtgggacttttctccttgtcatttacctgccatagataattagacaaatacttcctcgatgtctcaggtaatttatttttacagtagacattaataatacctccctcaggtttaatatgaggtttaaatgaggtaatgcatgcaaagcactaataacagaatctctcatgtcctaatctgttagtaattattatttatgcaaggtaaggctaccacaaataagataaaatattaacgtaatatatgtacttcatcattacattaaatagtaaatgttttgtgaccttctctatgagtatcaaataaatagctcaaaattgaaatatttaaaatgagactagaaaagtatttcttaaatatggtaaagagaatataaaataaaaaattaacattacctgtaacagaaaaacattagagaaacccttcttaaaaacaagatcaaaatatgggcgcacattgttaccacaggtaatgctgtcctgggtattcttatatgaaaatgaaataacaagactagtaatttaaagataaaaatgttattacactgtttaaataccaggaaaaatcaaatactaagaaatctgaaaaataaaaattatctagaaatttcactaacaaaggtaaccaggaatagataaacaattaaagatcaacttcattcaagttaattaaaacctctaaatagaaattataacacttctgcagaaatgattaaataaaaaggaggtatctcagggaggtggacctgaaagaaagattaattatatattttattagatagcacattcattcttaattatcagcagaatatttttgtaaaatattgacaacataacataaaacatgatttaaaatatagtgaccaaaaaacatcaaagatcatctgactgtctgggatgggggtggggctcgggagaaggaacataatggaaaacatttgccgtcagaagaaggtgtaacttatctttttacatctctttctctaactctgaaaatgaactgtgaactggagctctcttgaccacgctggtacctaaaattctcccatctcttccccagcaccttccagcgtcctctttacccagcaacagagaatgtcagctctatgatttctctgataggtgaatcccagccatgctgattcctctccacccatttccagtgctagaggcccacagtttcagtctcatctgcctccactcggcctcagttcctcatcactgttcctgtgctcacagtcatcaattatagaccccacaacatgcgccctgaagacagaatgttccatatcagagctgtgatcttgagagccctctccttggctttcctgctgagtctccgaggagctggggccatcaagggtgagtgctcaggaggacgcaggagcgtcggggtgagtgatggggtggttcacatcaattgctgcttcagggatcacagattttaggggctcattgatctatctggtcctcatagtctatgttccctctggccctcataataataacagcaataacagccagaatttatgagactcctgcatagtttctttccccatttacatctcacaggaatcttcaatgaagataatattccattcatttagaaattattccttttatttagaaattattttgaaaaaactgaagctcaaaaagatgaataagttttccaaggttacacagcagatcaacgagccaagtttgaagtccagacccagctctgagggtcatacactgccttccccagattcctgcacacagtgacctactatcagggccctcctatctctctgggatccccagcctctatcttttgtggctgctttacaggaactccgagctatggactctgcattaggagacgaagtgcaaagagtgtttctgtatcctccctctcttctaggaccctagggctcttcctgggtctttgtgggtggtcacaagctttcctctctcaagacagcagggttgcatggtcttgatagccttgtgattcgggttctgagagattcaggactgcaagggaggcctagacttttgatagctgcaaggactcagccagagatggaccgtagtgaatgctcctttttcctgtagctgaaatcagggagaatgacatcaagcctgtgcatgatgctgtcattccaaaatctagtgatggggaaggttagaatccataacgtacaagatgcacactggcttcagacagttttatttaagatgtgtagaataaagaggaggtcaggctgggtagaaccagaagtatctattgccctgttcgcggtcacctgagttatttctaatgttatgttataataaacaccacaataggcttctcttcatagatgcaaatactttttagtattcttggtagaaattcctaatgagctcagctgtctcttcagggcttccctgcccagtctcttaacatttaaacatgtcatttaccttaaaaacataagtgcaaaccaactgataaaaaacaaccttgccttcagtctgcatcctgtcccagagacactttctttgtgtcctcacacgtggagctaagcttctgacttgtctctggtacatccctgaggatcctctcatcttggccatcaggaacctctacagaaggtcaaattcagtgggttcttctcagtgcctctgacttgagttactaataacatttgcactataatccacttctttctgatgaactaccctgtccttatttttctcctgtttacctggatcctccttatcatcttttaaaccacctcttaactatcatgttctctcattataccctgagatctcggcaattctgatttttggcactcttcctggaaaatcttatttaacctgcacctgccactaatgactctcagttctatggcctaaattcctctcctgagaccacccataatccacaaatatctatgtattatttctccttagatgactttcaggtcttctaagtgcaatagccccacagtaaactcagtatcttctcccggtcaggctgtcttccctgagagaagtggcttttgccctgttttctgaatgcctacattgaagccatctgttccccaggaagccttccctgatgtgctgtttggtcgcatcttgtgtatacctacgtatctgcacttatccttctgaacctgctgttgtcctgtcacttgtgtttccttctgtgacttatacgcgtctgcagaacaggacgtatgtattatttttatttgggtatttagcatctaacagtgtttgacatatagtagtcttttaatacatatttttgtctgaatggaaatgatattttgaagaaaaataatctgttccatagctggctgatctttggactgcagaacttgtgaaagtgttttttaaaaagcattttaaaaagtacaagggacattcatgtattaagaagatgagtttccaataactgctagaggactttgtgtctttttattttaccctctttttcctgatgagtcctttgagtcctttaaactgaggagcaagctaagtttcctagtgaaatacctataggatttgttttgtttagtttcaaataccactctttgcttggccacttactgtgtcagggagtcattctcagtgaaaaataagacacaggtcataccctctagacacttacaattacagtggcaaggagtcattctcctgtcactgtaagtggccaagcacagactgggtccccacatgtcagggctgaaaactcacagggaaatctgtgagttgggaggtgagagcagaagagtcccgtagttccttctcactctgatgcatttatcattctaaacccagactttcacatacacattcatcgttttctttcatgataatagttgcttttatcctcttatctttgctaattcttacaaactaataaagactaagaaacaaaataaattaaatcctacaggtgttccaaactcagcaataatttctagttggcctctaaaacaaaaatcaaaatataaatgtaagaaaagtttagaatgcttagtacctgtgtgatgaaataatctgtacactaaacccccaagtcatgagtttacctatacaacaaacctgcacatgtactcctgaacataaaataaatgttgaaatatttttaaaaaggaaacaaaagtttggaacaaatgccaaaataactgtactgtacttttgaatttatatgccccaaatgaaaaatattatcaacaaagctatacattctacagtttcatgttcataaactaagacagaaactttaaaactgtcaagagccctaaaatttgaaggatattttcttcttcctctcaattttgtatttttttctaccttttctataataagaaaaagaaaatgtccattcccccacccccatgactctaaaaacaattttacatctgtgtcatagaaaaattaagatcttaatgggagagaaaacctctctactagttccgccagtagccgtatgaccttagcaagttattaatatgtaacttccctgcatttccttacctgtaaaatgtatgatatgtatttgcttcatagggttattgtgacaattcagcgagtgaaatatgtaaagtatttagaaggatgcctggcacaagtaagtgctcaacaaatgttagctgtcattgttactattactattgtgtagggtcaggatgcccagactttcaaagaccaggaagcagcttgacttatcagtgataaacttttcattttgttctttgctcctttctttttataactgctcatctgctctgtattatttcctttatggtgttgctccttcttcttccccatatgtccttcctttgacctcttaccttcttcctttttatattcataagtctttattcattctctagctttgaccacttgcatattcaaactgacattttgtcgtgtttttctctactgtctttatgcagcggaccatgtgtcaacttatgccgcgtttgtacagacgcatagaccaacaggggagtttatgtttgaatttgatgaagatgagatgttctatgtggatctggacaagaaggagaccgtctggcatctggaggagtttggccaagccttttcctttgaggctcagggcgggctggctaacattgctatattgaacaacaacttgaataccttgatccagcgttccaaccacactcaggccaccaacggtacgccctatctttgcctcttcctctgtagcccaactggaagggatgagagggcctctctgccaccctcagactaggaagcctaagtgccccctgctgtgtgatcctcttcccctagtggccatgggctgatcccactacagcaagggcttgcatcctctcttctcaggagagagaaaggtgagcagagtgaggctggtcagtggtgtgatacccctctctgtgattcagagctgccataaaatctaaggctgaggtagaggaccaccctcccctaagaggtggagcctttgtgattcatcccagaagaggggcctaacctggtgctgtctccttccagatccccctgaggtgaccgtgtttcccaaggagcctgtggagctgggccagcccaacaccctcatctgccacattgacaagttcttcccaccagtgctcaacgtcacgtggctgtgcaacggggagctggtcactgagggtgtcgctgagagcctcttcctgcccagaacagattacagcttccacaagttccattacctgacctttgtgccctcagcagaggacttctatgactgcagggtggagcactggggcttggaccagccgctcctcaagcactggggtatgcaactgcttttctctccataatctcctggcatcctctattccaaagacctggtgtcctctgcaccagctttccgcactggctgggtctcagtcctctcctcgtcctaacatccaattaactggtccataaccttcaattcccacaaccatcccaggccatcaccaccctcactgcacctcctgaccctatctcttcattcttcccccagaggcccaagagccaatccagatgcctgagacaacggagactgtgctctgtgccctgggcctggtgctgggcctagtcggcatcatcgtgggcaccgtcctcatcataaagtctctgcgttctggccatgacccccgggcccaggggaccctgtgaaatactgtaaaggtgggaatgtaaagaggaggccctaggatttgtagaatgtaaggaagggaggaaaaattcaatctgataagtgttcattgatcttctaatgggttaaaagcattcagccacataacaacaacaacaccgataactaactgagtagttaatatggtcaggcgctattctgaggatttacatttattaactcactttattctcacacatagtctttgaggtaggtactattattttcactatttcacatgagagatacttacatctttttacatacacagagactttaagcactttgatcaagttcccacagctatgaagtagtagggctagcttccaatccagaaagtctggatccaagactgtttatccactgtcctattcaccctattttgtgaaggaaaagaccaagttcaaattctccagagtccattgccaaataatggagtcagatctatatttctatacataattacaacacagtgtggtgggtgcctgtaactacttactgtctctacttggactcattccatggcaatgttcacacaaaaaatgcccctccagagatcttacaggtttctatttatcataacactcaccatgctttatatttttatatgttttgggaattctcttagcattagacagtgaacttccatgcagatgaccacatctaattcattattattattgttattcatgctggacctcaggtacaaaaggttaagaacttctcagttcattatatgatcatcattggtgcctccgagctctctctctctcccttgatttatttggtcccttttatctccagtccttactcccatatctaacctcttacccctacctcataggtaaacattttaatgaatttgatgtttccttttatttgcatagatcctctgtaatatgtagtagtgtccagtgtacatgtatttttaattaaccaaaatggcattaaattatagatctaattttgtacatccagtttgtttcttccaaatcttccatagtattttactttatatgtccatgcattagtccattttgcattgctataaaggaatatctgaagttacctaatttacgaagaaaagagctttaaatggctcacagatctgcaggctgtacgcgaaacatggcactagcatctgcttctgttgggggattctggaagcttttactcatggtggaaggcaagtggagccagtgcatcacatggtcatagagggagaaagagacatagaaagaggtgccagcctctttttaacaaccaggtttcatgtgcactaatagagtgagaactcactcattacccggagaggggacaaagccattcatgagggtctcctccatgattcaaatacctcccaccaggccccacctgcaacactggggatcaattttcaacatgagacttggaagtgacaaatatccaaatcatattaatccacatatctacattgctcctgggatacctggatcattcctggttctctactattgcaagcaatgcttgtatctcacatggaactgcatatacatgtgggcctgacctgcatccctggaatgtatgtatcctagaaaggggttgcagggttgctggagatgcagctccttaatttgactaaacactgctcatcttctcatcagaatggctgtactcatctgaacttcctttgtcagtactctaattgtcctgcaactcctaaatggacttcaacactggacattatccagttttctaacttttgccaatttcatgtgcataaagaaatatgctgttttattttgcatttctttaattactaataattggggctataattaggactgattagccacttgggggttccttttctataaattgcctgttcacattcattgtccatttttgtactatgtgcttccatcattttcttattgatttgcaggtgatccttatatagtcctgctagtagtcccttgtcagttttaggcattgcaaatgttttcctctaatctgacttctggcaactgtctccttggtttcctttattgaagagaaatccttaatattttgtaatgaagtccatcaactgtatttttgtttgtgtgtcttttttaaaagaagtcttccctatactgagatatcaaagatactcttaaaacatctcctacagttttaaatttcacatttactactttaattcatctgggattcatctttgtgtttgatggggatcatgttttatttttctttatataatgggccagtgtgttcccacaactactaaatagttcaccttttccccataggttagtagtgtctcctttgctatactgaaagctcccattataggtgggcctgtgtctgagttccatcttgttccactgttctgtttgtctcttcttgtgccagtgtcctagtattttgattactatgacattgtagtgtgtgttagtatccagtaggacaaattcttgtttatttttcttagttcacacacatttataattatatctataatgatttgtaacagagtgaagtgaatgtagaatgtcagatgttaagaggaagaatggaaaagagggctgggactagggtgatgtaggggatgcacctggcttaggtgcaaaatttgggggataccaaaagaactcagtaataantcatattttaatgaaatatcttgaaaaggcaaaattaatgcaaagatacatgattaacaaaacatccaaagaggagtatttaacaaaaatggagaagcagagaagcagaagaattaggagaatatgctgtcacatgagccaaggaattaaagaattcaggaaggaggaagtactgctgtcagatgttcaacagaggtcattttagaaaatttaccttggtttttgaaatcctttcaaagagcagtatacacaatgtgagcaagtatccttcgttcattgccgtcattgatatggtttggatatttgtcccttccaattctcattccagggttaagcttcttctctgccctcagtaatgtggcccttccccttgtctgtatattttggagacatgaagcatgtgggatggcctcacagtcagctggggtttgagggtgaaattcaatgactttcgtgaactccttggctcctatgtgctcttcactggaggaccagggcatgtgcagggatgaccaccttctccctgggacctgaacagggcagagaaatgggaagctcgggtgcaaagggagtggggaagatgggtccgggcttacagtactgaacccaggaatgacaataactgtgtgtgttgctgcaggtgacaaaatatctgaacagaagaggacttaggagagatctgaactccagctgccctacaaactccatctcagcttttcttctcacttcatgtgaaaactactccagtggctgactgaattgctgacccttcaagctctgtccttatccattacctcaaagcagtcattccttagtaaagtttccaacaaatagaaattaatgacactttggtagcactaatatggagattatcctttcattgagccttttatcctctgttctcctttgaagaacccctcactgtcaccttcccgagaataccctaagaccaataaatacttcagtatttcagagcggggagactctgagtcattcttactggaagtctaggaccaggtcacatgtgaatactatttcttgaaggtgtggtttcaacctctgttgccgatgtggttactaaaggttctgatcccacttgaacggaaaggtctgaggatattgattcagtcctgggtttttccctaactacaggatagggtggggtagagaaaggatatttgggggaaattttacttggatgaagattttcttggatgtagtttgaagactgcagtgtttgaagtctctgagggaagagatttggtctgtctggatcaagatttcaggcagattaggattccattcacagcccctgagcttccttcccaaggctgtattgtaattatagcaatatttcatggaggatttttctacatgataaactaagagccaagaaataaaatttttaaaatgccctaattcattgcaatttttaccagccatagtcactccatgtgggagaacttaaatcatgattaccagagctttcaaaggtttgagaatagtgatgattatgaagaaaaatatcttatttgagcaaggattttgtttctttatgagtgttcattagatattacgatgaaaaaagcatgaaatggtaaaaattcagataaatataaaaacatgttctctagttttttttaagttaaaaaaggaattgtttaaagtaaaaattatttgggggtttataacatacccagaagtaaaatatgatgacaatggcacaaagaatagaagggagaaatggaagtataatgttgtaagtttcttatacatgttaagtggtgtgttattatttgaaggtagaatgtattaagatgaatattttaagctcctgataactattgaaaaaaaaagaggtatagccaagaggccaatggagaagataaaatagaacactaagcataattaattcaaaataaagaaataaaaaagggaaagtctggtaagacaaaaagaaaacaaactgtaagatggtagagtttaaaacaaccatactaataattgaattaaatgcacatggcctaaatattctaatgaaaagggaaagattgtcagaatgcacaaaaaaatctacaggccaacttcatgctctctacataatgccctctttaaatatgaaggcaaagacaggtaaaaagtaaaagaatgggaaaatacatgtataccgtggaatgctatgcagccataaaaaaatgagttcatgttgtttgtggggacatggatgaagctggaagccatccttcacagcaaactaacacaggaacagaaaaccaaacaccacacgttctcactcgtaagtgggagttcaacaattagaacacatggacacagggaggggaacacctcacaccagggtctgtcagggcatggggagcaaggggagggagagcattaggacacataccgaatgtattgcatggcttaaaacctagatgatgggttgatagatgcagcaaaccacatggcacatgtataactatgtaacaaacctgcacattctgcacatgtatcccagaacttaaagtaaaaaaaaaaaaaacgaaaataatgccaaccatggaagtattggtggctgtgttaatatcagaaatataagactcagaaatattaccaaggagaaagaaggatagttcataatgataaaagatcattttattatcaacatataacaatcctaaatgtgtttgttctagaaaatatgtcttaaatcacattataccaaaaatgataaaaataaatcagaaatagacaaattcacaattatattttagtattctagcactcagtaaacaataaaatatttaggaaaaaacttcatgaggacatgatagatttaaataacattatcaatgaaccaacgtgatctaatcaagatctgtagaatattccacccaatagtggcagaatacacattattttcaaatgctcaagaatattccacaggacagactatacactgggtcataaacacatataaataaatgtctaaataaataaatgtctctattgaaatcatacagaatacattctcggaccacaatagcattaaattagaaaccaataacagaaaaataccttgaaagtcccaaatacctagaaattaaaaagtatactgctaaacagcacctggatttaaaaagagtcagaaggaaaattagaaaatattttgaactgagtgaatatgaaagcacactatcaaaattagtatgatacactaattacacaataatttataactttacataattggaaaggagggaaactctaaaatcaaccatctatgttcccatcttaagaagctagaaaaaaaaagtcaaatgaatcccaagattaataagatcagaaataaatgcaataaaatggacaaacaataaagaaaataaacaaagtcaattgctggttttcaataaggctcaatacattcatgaatctctaggtagatggatcaagaaaaagagataagactcaaatccccaatatcagaaatggaagtgggtacgtcacaacaaatcatacagacattaaaagtattatgacagaatgctatgaaaatgccaataaacaaaaatgacaataaatttgacaatttacattgttaaattaaattaaatttggtgtaaagctttctccatatcttaaattcctacatagcaaactaacccaacttaacataactgcgttatgcaaacaaactacagcctaacttaagagtgttgtaataaatagctgagtctcagccaatcacaggctgccaagtgatcatattatgtcccccataagcaaatgcctcatcacgccatgcccatataaggcaaacactgagctgtaataaattggctggttttgagtatcacttcctgtttttatctataaacactgccttcacatgttgctggacagagctttctgaatctttctgggttctgagggctccccaattcatgaattgttctttgctaaataaactctgttaaattcaacttctctaaaatttttattttaacaacatgaaatagaaacatttcttgaacgattcaaattaccaaaactaaatcaagaagaaatctctgtcaatggaagaaattaagtttgtaattttaaaaatccttctcacagagaaggccaaatggtttccaggtcagatggcttcattgattaatccatagtattctgtcataatactgtcataatacttttaatgtctgtatgattaattctattatacatttaaggaagaaacaatacaaactcaatacaaactctttcaacaaaagagcagaagaaaacacatcccaataatttacaagtccaatatactaacatcaaacaatgacattaaaagaaaaggaaactaaagacacacaaacatagccatgaaaatgtttaacaaaatattttttaaaattgaattc

SEQ ID NO: 692 - DNA, 335 bp, Homo sapiens
  Genbank Accession No. X03689
cgcacggttaccaccggaacacgggtatcgtgaaaactacccctaaagccaaaatgggaaaggaaaagactcatatcaacattgtcgtcattggacacgtagattcgggcaagtccaccactactggccatctgatctataaatgcggtggcatcgacaaaaggaccattgaaaagtttgagaaggaagctgctgagatggggaagggctccttcaaatatgcctgggtcttggataaactgaaagctgagcgtgaacgtggtatcaccattgatatctccttgtggaaatttgaaaccgcaaagtactatgtgactatcattgatgccccaggg

SEQ ID NO: 693 - DNA, 1113 bp, Homo sapiens
  Genbank Accession No. X04201
ttgccccagtctccagttctccagtgttcacaggtgagcctaccaacagccactgctcatgatggaggccatcaagaaaaagatgcagatgctgaagttagacaaggagaatgctctggatcgggctgagcaagctgaagctgagcagaagcaggcagaagaaagaagtaaacagctggaggatgagctggcagccatgcagaagaagctgaaagggacagaggatgagctggacaagtattctgaagctttgaaggatgcccaggagaagctggaactggcagagaagaaggctgctgatgctgaggctgaggtggcctccttgaaccgtaggatccagctggttgaagaagagctggaccgtgctcaggagcgcctggccactgccctgcaaaagctggaagaagctgaaaaagctgctgatgagagtgagagaggtatgaaggttattgaaaaccgggccttaaaagatgaagaaaagatggaactccaggaaatccaactcaaagaagctaagcacattgcagaagaggcagataggaagtatgaagaggtggctcgtaagttggtgatcattgaaggagacttggaacgcacagaggaacgagctgagctggcagagtctaagtgttctgagctggaggaggagctgaagaatgtcaccaacaacctcaagtctcttgaggctcaggcggagaagtactctcaaaaagaagataaatatgaggaagaaatcaagattcttactgataaactcaaggaggcagagacccgtgctgagtttgctgagagatcggtagccaagctggaaaagacaattgatgacctggaagatgagctctatgcccagaaactgaagtacaaggccattagcgaggagctggaccacgccctcaatgacatgacctctatataattatcaccgtttctgctctgttctggatctgccccctttactcctcggggaacccaaggccccactctcgctctggattccatttgggtcagcctggctggtccccaaggcattaggatgggggagcaaaaagcaacttatgtattttcttccacccccaccccaaattaaaatgttaagctgctggaaaaaaaaaa

SEQ ID NO: 694 - DNA, 835 bp, Homo sapiens
  Genbank Accession No. X05451
gagcctaactactcttagccttccctgctgtgttgctgcccagccgctccatcatgtccttcagtgctgaccagattgctgaattcaaggaggcatttctcctctttgacagaacaggtgattccaagatcaccttaagccaggtcggtgatgtccttcgagccctgggcacaaatcccaccaatgcagaggtcaggaaagttctgggaaaccccagcaatgaagagctgaatgccaagaaaattgagtttgaacaatttctgcctatgatgcaagccatttccaacaacaaggaccaggccacctatgaagactttgttgagggtctgcgtgtctttgacaaggaaggcaatggcacagtcatgggtgctgaactccgccatgttctagccaccctgggtgaaaagatgaaagaggaagaagtggaagccctgatggcaggtcaagaagactccaatggctgcatcaactacgaagcttttgtcaagcacatcatgtctatctgaatggagctctcaagaacaagcattgtttaggaagactggctggaaacttattttaatcacacccatgacaaactctccagatctgtttaccatcattcaggaaaacaaagcaatctggacggttcaagactgagcaactccctgaatttttatacatcttcagtttttctctgaattgaattcataccacacaaacaaatgtctgctgctctagatgagaagaataaaatattgacaatctcaaatccaagcagccttctttattatctaccatgaatcaacgaaacattcttaaaacaataaatcaataaacaattttggtcagtctg

SEQ ID NO: 695 - DNA, 4204 bp, Homo sapiens
  Genbank Accession No. X06256
caggacagggaagagcgggcgctatggggagccggacgccagagtcccctctccacgccgtgcagctgcgctggggcccccggcgccgacccccgctcgtgccgctgctgttgctgctcgtgccgccgccacccagggtcgggggcttcaacttagacgcggaggccccagcagtactctcggggcccccgggctccttcttcggattctcagtggagttttaccggccgggaacagacggggtcagtgtgctggtgggagcacccaaggctaataccagccagccaggagtgctgcagggtggtgctgtctacctctgtccttggggtgccagccccacacagtgcacccccattgaatttgacagcaaaggctctcggctcctggagtcctcactgtccagctcagagggagaggagcctgtggagtacaagtccttgcagtggttcggggcaacagttcgagcccatggctcctccatcttggcatgcgctccactgtacagctggcgcacagagaaggagccactgagcgaccccgtgggcacctgctacctctccacagataacttcacccgaattctggagtatgcaccctgccgctcagatttcagctgggcagcaggacagggttactgccaaggaggcttcagtgccgagttcaccaagactggccgtgtggttttaggtggaccaggaagctatttctggcaaggccagatcctgtctgccactcaggagcagattgcagaatcttattaccccgagtacctgatcaacctggttcaggggcagctgcagactcgccaggccagttccatctatgatgacagctacctaggatactctgtggctgttggtgaattcagtggtgatgacacagaagactttgttgctggtgtgcccaaagggaacctcacttacggctatgtcaccatccttaatggctcagacattcgatccctctacaacttctcaggggaacagatggcctcctactttggctatgcagtggccgccacagacgtcaatggggacgggctggatgacttgctggtgggggcacccctgctcatggatcggacccctgacgggcggcctcaggaggtgggcagggtctacgtctacctgcagcacccagccggcatagagcccacgcccacccttaccctcactggccatgatgagtttggccgatttggcagctccttgacccccctgggggacctggaccaggatggctacaatgatgtggccatcggggctccctttggtggggagacccagcagggagtagtgtttgtatttcctgggggcccaggagggctgggctctaagccttcccaggttctgcagcccctgtgggcagccagccacaccccagacttctttggctctgcccttcgaggaggccgagacctggatggcaatggatatcctgatctgattgtggggtcctttggtgtggacaaggctgtggtatacaggggccgccccatcgtgtccgctagtgcctccctcaccatcttccccgccatgttcaacccagaggagcggagctgcagcttagaggggaaccctgtggcctgcatcaaccttagcttctgcctcaatgcttctggaaaacacgttgctgactccattggtttcacagtggaacttcagctggactggcagaagcagaagggaggggtacggcgggcactgttcctggcctccaggcaggcaaccctgacccagaccctgctcatccagaatggggctcgagaggattgcagagagatgaagatctacctcaggaacgagtcagaatttcgagacaaactctcgccgattcacatcgctctcaacttctccttggacccccaagccccagtggacagccacggcctcaggccagccctacattatcagagcaagagccggatagaggacaaggctcagatcttgctggactgtggagaagacaacatctgtgtgcctgacctgcagctggaagtgtttggggagcagaaccatgtgtacctgggtgacaagaatgccctgaacctcactttccatgcccagaatgtgggtgagggtggcgcctatgaggctgagcttcgggtcaccgcccctccagaggctgagtactcaggactcgtcagacacccagggaacttctccagcctgagctgtgactactttgccgtgaaccagagccgcctgctggtgtgtgacctgggcaaccccatgaaggcaggagccagtctgtggggtggccttcggtttacagtccctcatctccgggacactaagaaaaccatccagtttgacttccagatcctcagcaagaatctcaacaactcgcaaagcgacgtggtttcctttcggctctccgtggaggctcaggcccaggtcaccctgaacggtgtctccaagcctgaggcagtgctattcccagtaagcgactggcatccccgagaccagcctcagaaggaggaggacctgggacctgctgtccaccatgtctatgagctcatcaaccaaggccccagctccattagccagggtgtgctggaactcagctgtccccaggctctggaaggtcagcagctcctatatgtgaccagagttacgggactcaactgcaccaccaatcaccccattaacccaaagggcctggagttggatcccgagggttccctgcaccaccagcaaaaacgggaagctccaagccgcagctctgcttcctcgggacctcagatcctgaaatgcccggaggctgagtgtttcaggctgcgctgtgagctcgggcccctgcaccaacaagagagccaaagtctgcagttgcatttccgagtctgggccaagactttcttgcagcgggagcaccagccatttagcctgcagtgtgaggctgtgtacaaagccctgaagatgccctaccgaatcctgcctcggcagctgccccaaaaagagcgtcaggtggccacagctgtgcaatggaccaaggcagaaggcagctatggcgtcccactgtggatcatcatcctagccatcctgtttggcctcctgctcctaggtctactcatctacatcctctacaagcttggattcttcaaacgctccctcccatatggcaccgccatggaaaaagctcagctcaagcctccagccacctctgatgcctgagtcctcccaatttcagactcccattcctgaagaaccagtccccccaccctcattctactgaaaaggaggggtctgggtacttcttgaaggtgctgacggccagggagaagctcctctccccagcccagagacatacttgaagggccagagccaggggggtgaggagctggggatccctcccccccatgcactgtgaaggacccttgtttacacataccctcttcatggatgggggaactcagatccagggacagaggcccagcctccctgaagcctttgcattttggagagtttcctgaaacaactggaaagataactaggaaatccattcacagttctttgggccagacatgccacaaggacttcctgtccagctccaacctgcaaagatctgtcctcagccttgccagagatccaaaagaagcccccagtaagaacctggaacttggggagttaagacctggcagctctggacagccccaccctggtgggccaacaaagaacactaactatgcatggtgccccaggaccagctcaggacagatgccacaaggatagatgctggcccagggccagagcccagctccaaggggaatcagaactcaaatggggccagatccagcctggggtctggagttgatctggaacccagactcagacattggcaccaatccaggcagatccaggactatatttgggcctgctccagacctgatcctggaggcccagttcaccctgatttaggagaagccaggaatttcccaggacctgaaggggccatgatggcaacagatctggaacctcagcctggccagacacaggccctccctgttccccagagaaaggggagcccactgtcctgggcctgcagaatttgggttctgcctgccagctgcactgatgctgcccctcatctctctgcccaacccttccctcaccttggcaccagacacccaggacttatttaaactctgttgcaagtgcaataaatctgacccagtgcccccactgaccagaactagaaaaaaaaa

SEQ ID NO: 696 - DNA, 2520 bp, Homo sapiens
  Genbank Accession No. X06700
  unsure (1)..(2520): n = a or c or g or t
gctgggatcactggagcacggggtcttgcaggaccaccaggcatgccaggtcctaggggaagccctggccctcagggtgtcaagggtgaaagtgggaaaccaggagctaacggtctcagtggagaacgtggtccccctggaccccagggtcttcctggtctggctggtacagctggtgaacctggaagagatggaaaccctggatcatatggtcttccaggccgagatggatctcctggtggcaagggtgatcgtggtgaaaatggctctcctggtgcccctggcgctcctggtcatccaggcccacctggtcctgtcggtccagctggaaagagtggtgacagaggagaaagtggccctgctggccctgctggtgctcccggtcctgctggttcccgaggtgctcctggtcctcaaggcccacgtggtgacaaaggtgaaacaggtgaacgtggagctgctggcatcaaaggacatcgaggattccctggtaatccaggtgccccaggttctccagggcctgctggtcagcagggtgcaatcggcagtccaggacctgcaggccccagaggacctgttggacccagtggacctcctggcaaagatggaaccagtggacatccaggtcccattggaccaccagggcctcgaggtaacagaggtgaaagaggatctgagggctccccaggccacccagggcaaccaggccctcctggacctcctggtgcccctggtccttgctgtggtggtgttggagccgctgccattgctgggattggaggtgaaaaagctggcggttttgccccttattatggagatgaaccaatggatttcaaaatcaacaccgatgagattatgacttcactcaagtctgctaatggacaaatagaaagcctcattagtcctgatggttctcgtaaaaaccccgctagaaactgcagagacctgaaattctgccatcctgaactcaagagtggagaatactgggttgaccctaaccaaggatgcaaattggatgctatcaaggtattctgtaatatggaaactggggaaacatgcataagtgccaatcctttgaatgttccacggaaacactggtggacagattctagtgctgagaagaaacacgtttggtttggagagtccatggatggtggttttcagtttagctacggcaatcctgaacttcctgaagatgtccttgatgtgcagctggcattccttcgacttctctccagccgagcttcccagaacatcacatatcactgcaaaaatagcattgcatacatggatcaggccagtggaaatgtaaagaaggccctgaagctgatggggtcaaatgaaggtgaattcaaggctgaaggaaatagcaaattcacctacacagttctggaggatggttgcacgaaacacactggggaatggagcaaaacagtctttgaatatcgaacacgcaaggctgtgagactacctattgtagatattgcaccctatgacattggtggtcctgatcaagaatttggtgtggacgttggccctgtttgctttttataaaccaaactctatctgaaatcccaacaaaaaaaatttaactccatatgtgttcctcttgttctaatcttgtcaacagtgcaaggtggaccgacaaaattccagttattatttccaaatgtttggaaacagtataatttgacaaagaaaaatgatagttcccttttttgctgttccaccaaatacaattcaatgctttttgttttatttttttaccaattccaatttcaaaatgtctcaatggtgctataataaataaacttcaacactctttatgataacaacactgtgttatattctttgaatcctagcccatctgcagagcaatgactgtgctcaccagtaaaagataacctttctttctgaaatagtcaaatacgaaattagaaaagccctccctattttaactacctcaactggtcagaaacacagattgtattctatgagtcccagaagatgaaaaaaattttatacgttgataaaacttataaatttcatgattaatctcctggaagattggtttaaaagaaagtgtaatgcaagaattaaagaaatatttttaaagccacaattattttaatattggatatcaactgcttgtaaaggtgctcctcttttttcttgtcattgctggtcaagattactaatatttgggaaggctttaaagacgcatgttatggtgctaatgtactttcacttttaaactctagatcagaattgttgacttgcattcagaacataaatgcacaaaatctgtacatgtctcccatcagaaagattcaccggcatgccacaggggattctcctccttcatcctgtaaaggtcaacaataaaaaccaaattatggggctgcttttgtcacactagcataggagaatgtgttgaaatttaactttgtaagcttgtatgtggttgttgatcttttttttccttacagacaaccataataaaatatanattaaaattca

SEQ ID NO: 697 - DNA, 1200 bp, Homo sapiens
  Genbank Accession No. X06825
cccgctccgtcctcctcgcctgccaccggtgcacccagtccgctcacccagcccagtccgtccggtcctcaccgcctgccggccggcccaccccccaccgcaggccatggacgccatcaagaagaagatgcagatgctgaagctggacaaggagaacgccatcgaccgcgccgagcaggccgaagccgacaagaagcaagctgaggaccgctgcaagcagctggaggaggagcagcaggccctccagaagaagctgaaggggacagaggatgaggtggaaaagtattctgaatccgtgaaggaggcccaggagaaactggagcaggccgagaagaaggccactgatgctgaggcagatgtggcctccctgaaccgccgcattcagctggttgaggaggagctggaccgggcccaggagcgcctggctacagccctgcagaagctggaggaggccgagaaggcggctgatgagagcgagagaggaatgaaggtcatcgaaaaccgggccatgaaggatgaggagaagatggaactgcaggagatgcagctgaaggaggccaagcacatcgctgaggattcagaccgcaaatatgaagaggtggccaggaagctggtgatcctggaaggagagctggagcgctcggaggagagggctgaggtggccgagagtaaatgtggggacctagaggaggagctgaaaattgttaccaacaacttgaaatccctggaggcccaggcggacaagtattccaccaaagaagataaatatgaagaggagatcaaactgttggaggagaagctgaaggaggctgagacccgagcagagtttgccgagaggtctgtggcaaagttggagaaaaccatcgatgacctagaagatgaagtctatgcccagaagatgaagtacaaggccattagcgaggaactggacaacgcactcaatgacatcacctccctctgagccccacgcccagcgtgccacctcagctctcttctctcctctcctttccattctctctatggggaggggagagcaggcaggaggagcagaaattgccaacattgcacagccaggctgggagcagcctagggagagcccccatcatgcccaccacccactctggcactggcttcatcctttacctatccccttccaccctcctttgcttgcttaataaattctgaacttggaaaaaaaaa

SEQ ID NO: 698 - DNA, 6826 bp, Homo sapiens
  Genbank Accession No. X06956
atgcctgtaatcccagcactttgggaggttgaggcgggtggatcgcttgagctcaggagttcaagacaaatctggacaatatggcgagaccttgtctctactaaaaatacaaaaaataaggccgggtgtgggggctcacacctgtaatcccagcactttgggaggctgaagcaggtggatcatctaaggtcaggagttggagaccagcctgaccaacatggtgaaaccccgtctctactaaaaatacaaaaatcatccaggcatccatgcctgtaatcccagctactccagaggctgaggcaggagaatcgctagaacccgcgaggcaggtgttgaggtgagccgaaatcgtgccattgcactccagcctgggcaacaagagcgaaactccatctcaaaaatagataaataaataaaataagctgggcatggtggtggtgcacgcctgtggtctcagctactgaggaggctgaggtggaaggatgaggtagaaggatggccttgagccgggagatggaggttgcaatgagctgagattgcaccactgcactctagcctgggtgacacagcaagacactgactcaaaagagagagagagagagagaaagagaaagcagaagtagcttgaaaagatggggtggagagaacggaatgaaatgtagaaagaagggcttctgcggagaccaggggctgagtgctgagaccattaaggtgcgggttgcagatcctgctcttgggttagagacagaagagaccaagagtcagaatcatccaagatatgagaatctcgattttcttcttttctcttcagaggcaacagacattttgatagcttacaacaatgtttccactatgacatcactgtctccttttcacccacgaaaatgtcaaggactcagtgaggttaagtcacttgctcaaggtcacacagggtagcctggaggagaatccaggtcctgaggtcccccggtcagcgctcccgcagttctggcagcaggggagtgggcaggtgcccgcagcgagggcatcatagtgactgcgctgatgacagcgccactgacccgcgggcggccggcgagccgcggcagattccggggtcggccccggcagacaggctgcggggctcgactctgcgggagcgcctaaggcattggcaatctggggctcaggctgtgcagttctgggtcctcggccgcccacaggcgtcggcgaaaggctgccgccccggccggggaccaggaagcgtcaggcagctggcaagggctccccggggacgcgccacagcctcacagccggcccgagtctcctgggaggcagggctggaagggcaggggtgaaggccagctgtggccgcttgggaaggaccgcctcgcctgctcccgacctaagtcagaacacctggatgaccggtgcctccaggacgcaggtgcaggtgagactcgccctgccacagcaccctgcatctccgcggaggccctcgggagcccagcgtgtctgctcaaaacgaggaaagaatggttaaagcccgaatcgcgactcttaatcccagcgggacaggtgagggacccccgcgcagcttggggagggtaccaggccaggctccgcccctcgggggggccgcttaccctcccgggaggcgtggcctgcgggccgcccagcctctagtgggcgagcggggaacgcgggccccgccccccccccgcctataagggcggtgcggcactgcagctagcgcagttctcactgagacctgtcaccccgactcaacgtgagacgcaccgcccggactcaccatggtgagtgcggcccggccggggtcgcgcctgtcccctaattgcccctgtcctttgggggacacttcttccaggcatgctcggggacctccaccgggcgttccgggtctcaggaggtgcgagggttttgcatcctccctccccaaccccctcctggtgactttggccgagccgtatagttcaccttcggtggctggggttggggcttggggtggagtgcgactcttcagtaacagagaggaacccttcctggcactctgctcctgccttacgagcatttgtgtcccgactctgtatgagagtcacgcgggcccgcgccccgtcctttccgcgggcaaaagaagacgggtttggctgccctcttacatccccagtccctggtcctcagcactgaccgagcacgtgcttggcgctagaaggtggaaggggtcaggttacctggtgccgcatccccctttcctctgtgtatgcattccaactatccacagaaccaccccccccccgtgactcagcaccccgcgtctgagctgagagggttggtgggaacggggttcggcctcctgaagcgagctggccctctccagccgaagcccgggtgcgcggatgggcagagacagctggcgctgagcactgcgcgggccgaggccaggttggggggaggggagagaggtgcatgtagggggtggtatttatagcccaggagcgggggccgaaacccaatccccgctttgggctgggaaataactgtaaagactccagagggagagcggatgtagggctgggctgcaggatggcgcccatcctgcccgggacaaggcgggtcacctctggggcctcaccgcagttccacttcctttctcgggtatttggaaaccgtcaccccgccatttcggtgtgggaagagcgcgcgggccctgccggactttagtgctttaggggttaatttcgggctgacagggacggagcctaaggcagtgagcgccccagtaccctcaaaccttattgctggcccctgctgtctgagcttacaagcattaccgccgctatttccgtgcgggctgacacgggagatgaaagtggtgaagacacccagggtgcgggggtggaggtggggagaggagccagatgggattgatccccagagccagatgggatttaaaggtgagggaggagggcatcctgatggcgtgtggtcagttgatgccagattggatggctgagacacctctgcagcttacaggaaagacagagggaaagggttctatgaattctagctgttcatactcaaagcaaataattaatcaagtggggggggggcctctagctgtaaacccatacctctaggaaaccttttgtcatgtggagccacagtgctcacttgacagattccccactgagaagtgggctaagaggttggcctgcattgctgggtgcctccaggtggggagtcctgtacctgggagcccgggcaggctgctactctcttctcacctctgcccagccccaaccctccactcttgccaactgagtcatcctagctggtagatgatagggtggaagagagactcgcaaggtgaggacttgtggatgtggggctcatgctgtgtcccctctctctatccctcagcgtgaatgcatctcagtccacgtggggcaggcaggtgtccagatgggcaatgcctgctgggagctctattgcttggaacatgggattcagcctgatgggcagatgcccagtgacaagaccattggtggaggggacgactccttcaccaccttcttctgtgaaactggtgctggaaaacacgtaccccgggcagtttttgtggatctggagcctacggtcattggtgagaggaagtggggacaaaattgaagggggtggagcatgactcaaagcttctccctggagagagagggtatttagaccaggcattcctagccctgaaaattcctagccgtacttgaagctgcagaaggcaagctgatctgagactggcctgggcagctggtctgggtttctctcacactctggtatctcaggctggcaggaggatgagtccttccatgcatctggccacagctaccaccctgggggaggaaggtccctgctgagcatagctttgtggtttttgcccttccagatgagatccgaaatggcccataccgacagctcttccacccagagcagctcatcactgggaaagaggatgctgccaacaactatgcccgtggtcactataccattggcaaggagatcattgacccagtgctggatcggatccgcaagctggtgagagtgtgtcttgggagggagggaacttttgagactgtgctaatggtcaggaatattttttttcagatcctttcaggaggtcatctctaactatacatggtctcgagtgtggtgctgctatggcatcctcagtatttgccctgactgctgatgtatcttacgctttatggagccaggtgatagagtccctcaggcccctcccctacctaaactgttctttctcgttcttgcctttcagtctgaccagtgcacaggacttcagggcttcctggtgttccacagctttggtgggggcactggctctggcttcacctcactcctgatggagcggctctctgttgactatggcaagaaatccaagctggaattctccatctacccagccccccaggtgtctacagccgtggtcgagccctacaactctatcctgaccacccacaccaccctggagcactcagactgtgccttcatggtggacaacgaagcaatctatgacatctgccgccgcaacctagacatcgagcgcccaacctacaccaacctcaatcgcctcattagccaaattgtctcctccatcacagcttctctgcgctttgacggggccctcaatgtggacctgacagagttccagaccaacctggtgccctaccctcgcatccacttccccctggccacctatgcaccagtcatctctgcagaaaaggcataccacgagcagctgtcggtggcagagatcaccaatgcctgctttgagcctgccaaccagatggtaaagtgtgatccccggcacggcaagtacatggcctgctgcctgctgtaccgtggagatgtggtgcccaaggatgtcaacgctgccattgccgccatcaagaccaagcgcagcattcagtttgtggactggtgccccacaggcttcaaggttggtatcaactaccagcctcccactgtggtgcctgggggtgacctggccaaggtgcagcgtgccgtgtgcatgctgagcaacacgaccgccatcgccgaggcctgggcccgcctggaccacaagttcgacctgatgtatgccaagagggcgtttgtgcactggtatgtgggtgagggcatggaggagggtgagttctccgaggcccgtgaggatatggctgccctggagaaggattatgaggaggtgggcatcgactcctatgaggacgaggatgagggagaagaataaagcagctgcctggagcctattcactatgtttattgcaaaatcctttcgaaataaacagtttccttgcacggtttcttgttccctctgagtgcttgagcttctgctgccttccccttcatgctgctgctgctctgtttgctgttcatgacccttatcccttccatcgctgaaggtgagacctgcaaaggggttcttgccaggcccaggaagcataaccccagggactttaaattgaagtcctagggttactcagtatagggaggaaatgaggaccaaaatccaggcacaaactgttgaaggatgagtcttcagctcctttccaagtaggagtataatccagtggtttctgtctttgaaagttagactgctaccctgttcttcctgctgcctctacatttaccaactctggaagcaaggcttggcccaggctcctctgtgcattatgagggtttgggagtggggctgggctggcccagagttcctgggcatggagccacgtcataagcttgggggatgggagggaacacaggcgatctcctagagttgtttgtgccactgcacctctgagccagctttgcatagcttcctgtcttgctgctttgctggagctggggctgtgccattaaaagtcaggtcatctcccctctgtttgtgatttctttctggcctcagcctctgtgctagctagtgggagactcctgctagggccctggggaaagcttcaactttgctaacaggagccccaggccccatgctgatgtcatactgtggggtagacatggttcgggggaggaggcttggatcacaaaagagcaggagatgccaaccctgcccttgcctttcctccctggtgattcagggaacagagcccttccctagggaacaggtttgaagcccagctaagacagggcccctgtttactcagcagagtaggcaggaagtggcagctggatactgccacaccacactgcctcattaatcattaaccatgtatgagcttgaacgatcagggagacacaggccaaaacagctgccgctgccacctccactcccctcgcccctaggctgaggatgggagacctgtaatctacctgtctcaaagcttcctcaggtgtctccacccagaggcccttgcctagcaaaccggctaggcagctttgactaagctactcaccccaggagtgaaggaaggaaagaactagttgagtgtttttagggggccctagttcttgacacaggcagatgccagcttgagcccaagcagctttaagttttgatctaagacaagctagaactgtccactgctaaccaacctcctgtagaatgaagtcacaccattgccgactctgcaccattcctccttcccaggcagttcgcctgaaatggcaacctgactttgggccccttgcacctcttctctcactccaggaacactgagactaagatctacaccaacctgcttccactttattcttgtttacacattctcctgctcccagatttggagtcagaacactatgtgagctc

SEQ ID NO: 699 - DNA, 3321 bp, Homo sapiens
  Genbank Accession No. X07109
cagagccggcgcaggggaagcgcccggggccccgggtgcagcagcgcccgccgcctcccgggcctccccggcccgcagcccggggtcccgggccccggggccggcacctctcgggctccggctccccgcgcgcaagatggctgacccggctgcggggccgccgccgagcgagggcgaggagagcaccgtgcgcttcgcccgcaaaggcgccctccggcagaagaacgtgcatgaggtcaagaaccacaaattcaccgcccgcttcttcaagcagcccaccttctgcagccactgcaccgacttcatctggggcttcgggaagcagggattccagtgccaagtttgctgctttgtggtgcacaagcggtgccatgaatttgtcacattctcctgccctggcgctgacaagggtccagcctccgatgacccccgcagcaaacacaagtttaagatccacacgtactccagccccacgttttgtgaccactgtgggtcactgctgtatggactcatccaccaggggatgaaatgtgacacctgcatgatgaatgtgcacaagcgctgcgtgatgaatgttcccagcctgtgtggcacggaccacacggagcgccgcggccgcatctacatccaggcccacatcgacagggacgtcctcattgtcctcgtaagagatgctaaaaaccttgtacctatggaccccaatggcctgtcagatccctacgtaaaactgaaactgattcccgatcccaaaagtgagagcaaacagaagaccaaaaccatcaaatgctccctcaaccctgagtggaatgagacatttagatttcagctgaaagaatcggacaaagacagaagactgtcagtagagatttgggattgggatttgaccagcaggaatgacttcatgggatctttgtcctttgggatttctgaacttcagaaggccagtgttgatggctggtttaagttactgagccaggaggaaggcgagtacttcaatgtgcctgtgccaccagaaggaagtgaggccaatgaagaactgcggcagaaatttgagagggccaagatcagtcagggaaccaaggtcccggaagaaaagacgaccaacactgtctccaaatttgacaacaatggcaacagagaccggatgaaactgaccgattttaacttcctaatggtgctggggaaaggcagctttggcaaggtcatgctttcagaacgaaaaggcacagatgagctctatgctgtgaagatcctgaagaaggacgttgtgatccaagatgatgacgtggagtgcactatggtggagaagcgggtgttggccctgcctgggaagccgcccttcctgacccagctccactcctgcttccagaccatggaccgcctgtactttgtgatggagtacgtgaatgggggcgacctcatgtatcacatccagcaagtcggccggttcaaggagccccatgctgtattttacgctgcagaaattgccatcggtctgttcttcttacagagtaagggcatcatttaccgtgacctaaaacttgacaacgtgatgctcgattctgagggacacatcaagattgccgattttggcatgtgtaaggaaaacatctgggatggggtgacaaccaagacattctgtggcactccagactacatcgcccccgagataattgcttatcagccctatgggaagtccgtggattggtgggcatttggagtcctgctgtatgaaatgttggctgggcaggcaccctttgaaggggaggatgaagatgaactcttccaatccatcatggaacacaacgtagcctatcccaagtctatgtccaaggaagctgtggccatctgcaaagggctgatgaccaaacacccaggcaaacgtctgggttgtggacctgaaggcgaacgtgatatcaaagagcatgcatttttccggtatattgattgggagaaacttgaacgcaaagagatccagcccccttataagccaaaagcttgtgggcgaaatgctgaaaacttcgaccgatttttcacccgccatccaccagtcctaacacctcccgaccaggaagtcatcaggaatattgaccaatcagaattcgaaggattttcctttgttaactctgaatttttaaaacccgaagtcaagagctaagtagatgtgtagatctccgtccttcatttctgtcattcaagctcaacggctattgtggtgacatttttatgtttttcattgccaagttgcatccatgtttgattttctgatgagactagagtgacagtgtttcagaacccaaatgtcctcaggtagtttggagcatctctatgagatgggattatgcagatggcctatggaaaatgcagctgcataattaacacattatcaaagtcctcttacaatttattttccgcagcatgtcagctaagtagacccaatggggagagaaaatgcctgctttctttccctctttttctgcactgccatattcacccccaaccatccaatctgtggataattggatgttagcggtactcttccacttccggtcctggagcttggcttgtatccaagtgtatggttgctttgcctaagaggaatccctctatttcacctgttctggaggcaccagaccttgaaaagaacatgctcaaaataaaatgttatctgttatttttgtaaactcaaagttaagatgatcaaagttctaaaattccaagaatgtgcttttagacggtctcaatctaaaagcacttcaaggggtcaaagggcaaccagcttggtgctacctcagtgttgtagtttctgatactttatgtctttgctcaccctcatccccaaactacttgaaaagggcatttggcaccactctctgaaacaacacagtcactctagcaaggcccccaaagggccctggttttacattacatttcaaactttatttgctttggggttttgtttctgttgttgttcaaatgcaaaaaaaagaaaaaaaaaagaaaaaaaaaggtgactcacattgttacacatgctttaaaatatgtgttcaaatgttattaaccacaatgacgacctgttttgatttaaccaagaagacggctgcggagcctagcagactcaggcctgtgggaatgggatttgttacaaatctaggtttgttactggcttcagaaagctaattaagtgctctgaaaaagacaccgtttcttgaaacaaagatggttgtattcctcactttgatgttgttttgcaagatgtttgtggaaatgttcatttgtatctggatctctgttatgtgccatttttcttctagcatcgag

SEQ ID NO: 700 - DNA, 1629 bp, Homo sapiens
  Genbank Accession No. X07438
gacagccccactccaatgactttttccctcctaattacccttttaaataaaatttatgaaggttttcataaattttaaaactgatttacacactttaataaaagcatgtgatggacagggagtattaggctgcagattttctacaatgaaattgacgtgagcacatcccagattatcaagtttgggagctgccccctcccccagcctccaagagctccccgcttgctcaggattgacaaatgtgtctctttcttggcagacaacagtgagctgggacggagacaagctccagtgtgtgcagaagggtgagaaggaggggcgtggctggacccagtggatcgagggtgatgagctgcacctggtaggttcctgggctgggtcaggccgggtccccagaggccctgtcattgttgaggtccagatggaccttggaaaaaggcaccatggatgggccttggttctgttctaaagcttctcttccaagggcctggaaaagatgcctgggtgactttaaaaaccaagcaatgtattttcaaggtctaggctgacccaatcatctaatcagagggaagaggtgaggagttatatccattaagcatcagcaatgagctaagcccttttgcattctataactctattctctcagaataggaatatggctcttattttagagatgaggacctgggggctctgaaagattagattacatgtccaaattgcacatctagaaagtggcagaacaaacatttgctcccaaatgatgtatatattcaccatgccaaattgtataggccaaagccaagaaggattctctaagcttctctaagatatgatctcaatctgggtcagcgggaggtgattcgggaggggaagcgtcaaggggtcctgttggtcagctctgagccacatccattcctctcagccagctctgtctgtagggtgctgcagagcactccactatacagtttaactgtctttccaaacaattggttacttaaaccaactcttggggaaaaataacagccaatgagtatttttagagttcttgccgtaagtgtgactctgctctggccaatgaccaacatctgcttttgtttcaggagatgagagtggaaggtgtggtctgcaagcaagtattcaagaaggtgcagtgaggcccaggcagacaaccttgtcccaaggaatcagcaggatgtgtgggccaggatccccctctttgcacagcatgaggcaaaaatgtccagccacccccaggcatctgttagcagagtctgtctcttggctttgtcacttttccttttcttaaaacaaagccatgccaataaagtgatctgtgttcaaaacgtctgtttgggggaagtttcactgcccactgtgctcactttttctccagggcttctgaggccagcttctcctagtgccacccatgggcagagtggataaattcagccacatgtcctgaaattgcaccgtgtttctctccagaggcacaggcttgggtctagaatgggaggtgggagagtggcctgacattcaatcatttgtgtatcaagtagctaccatgttatgtatctaattgtggccaaagtatagtgagtgccacaaagcaggagagtaccttcctcccta

SEQ ID NO: 701 - DNA, 2511 bp, Homo sapiens
  Genbank Accession No. X12795
cgccgcctgtgccatttctgattttgcaacttggggaagaagaaaaaagcgagagaagggagcttgctcgccggggggtggggaggggggaaggagagcgcggcccccccaggaacggagcgcggggggagcgggcgaggggagcaggggtgttggggggggagcctgagagcctgggggggctgcaaaaagagagaaagaaaacagcaggaaccacaacaaaacgccagcagggcgggcgggcgcgcagcagcagcggggcggccgaggcagtagcggcggcagcggcggcggcggcggaggcagcggccggtgtccggctcgggctcggctcctgcgaccccggggcgcccggcgggccccccgccccctccccctccccccttccccttccccttcccctcccagcgcgcccgcgcgccccgcggccctcggcgagcagctcggctccccccagcgctccccgggcccaaagatatggcaatggtagttagcagctggcgagatccgcaggacgacgtggccgggggcaaccccggcggccccaaccccgcagcgcaggcggcccgcggcggcggcggcggcgccggcgagcagcagcagcaggcgggctcgggcgcgccgcacacgccgcagaccccgggccagcccggagcgcccgccacccccggcacggcgggggacaagggccagggcccgcccggttcgggccagagccagcagcacatcgagtgcgtggtgtgcggggacaagtcgagcggcaagcactacggccaattcacctgcgagggctgcaaaagtttcttcaagaggagcgtccgcaggaacttaacttacacatgccgtgccaacaggaactgtcccatcgaccagcaccaccgcaaccagtgccaatactgccgcctcaagaagtgcctcaaagtgggcatgaggcgggaagcggttcagcgaggaagaatgcctccaacccagcccaatccaggccagtacgcactcaccaacggggaccccctcaacggccactgctacctgtccggctacatctcgctgctgctgcgcgccgagccctaccccacgtcgcgctacggcagccagtgcatgcagcccaacaacattatgggcatcgagaacatctgcgagctggccgcgcgcctgctcttcagcgccgtcgagtgggcccgcaacatccccttcttcccggatctgcagatcaccgaccaggtgtccctgctacgcctcacctggagcgagctgttcgtgctcaacgcggcccagtgctctatgccgctgcacgtggcgccgttgctggccgccgccggcctgcatgcctcgcccatgtctgccgaccgcgtcgtggccttcatggaccacatccgcatcttccaggagcaggtggagaagctcaaggcgctacacgtcgactcagccgagtacagctgcctcaaagccatcgtgctgttcacgtcagacgcctgtggcctgtcggatgcggcccacatcgagagcctgcaggagaagtcgcagtgcgcactggaggagtacgtgaggagccagtaccccaaccagcccagccgttttggcaaactgctgctgcgactgccctcgctgcgcaccgtgtcctcctccgtcatcgagcagctcttcttcgtccgtttggtaggtaaaacccccatcgaaactctcatccgcgatatgttactgtctgggagcagcttcaactggccttacatgtccatccagtgctcctagaccttgggcgcttcccacctgccccgtccccctagagactcagaggacccacctgggccaaggactccaaagccgcggggacaccgggaagtgcagcgggccaggcaggctgggtgggagggaggagggccgagacaggagcagcccacccagcagaaatacaatccgagctacaaagcatgggaaaaagagactcttttaggatcagatctgtgagcacgttggcgaggaaaaacaaaacaaacaaaaaaaagaaccttgtgtctgtctggtgaaaaaaagaaaaacaaattggaagagaggaccatgagaattttaataaaacagaaggaaactaatggaccttccaggatttattgtggacggatgtggatatattctgtacaggaacaacacatatggaagtggactgaagcctatgtagaaacacacacacactgaacattgttattcattttgtaaaatactagtctttattttcattttttgtaaaatttaaacatcgtatgcgcataaagaaaaaggaaacaagaattaggggaaaataacattttccaaataattataaaaaattgtcctgtgtctatgtatctatatctgttttgtatttttttctggttccaaaccagatttcctgtgattctatactaataatttttgatataaccctttgcttcttataatgagtgcgatatatgttgtcgaggctgttcttcaagaattaaaattgaagtgaaaatttaaacaaaaataaaagaattg

SEQ ID NO: 702 - DNA, 3464 bp, Homo sapiens
  Genbank Accession No. X16354
cagccgtgctcgaagcgttcctggagcccaagctctcctccacaggtgaagacagggccagcaggagacaccatggggcacctctcagccccacttcacagagtgcgtgtaccctggcaggggcttctgctcacagcctcacttctaaccttctggaacccgcccaccactgcccagctcactactgaatccatgccattcaatgttgcagaggggaaggaggttcttctccttgtccacaatctgccccagcaactttttggctacagctggtacaaaggggaaagagtggatggcaaccgtcaaattgtaggatatgcaataggaactcaacaagctaccccagggcccgcaaacagcggtcgagagacaatataccccaatgcatccctgctgatccagaacgtcacccagaatgacacaggattctacaccctacaagtcataaagtcagatcttgtgaatgaagaagcaactggacagttccatgtatacccggagctgcccaagccctccatctccagcaacaactccaaccctgtggaggacaaggatgctgtggccttcacctgtgaacctgagactcaggacacaacctacctgtggtggataaacaatcagagcctcccggtcagtcccaggctgcagctgtccaatggcaacaggaccctcactctactcagtgtcacaaggaatgacacaggaccctatgagtgtgaaatacagaacccagtgagtgcgaaccgcagtgacccagtcaccttgaatgtcacctatggcccggacacccccaccatttccccttcagacacctattaccgtccaggggcaaacctcagcctctcctgctatgcagcctctaacccacctgcacagtactcctggcttatcaatggaacattccagcaaagcacacaagagctctttatccctaacatcactgtgaataatagtggatcctatacctgccacgccaataactcagtcactggctgcaacaggaccacagtcaagacgatcatagtcactgagctaagtccagtagtagcaaagccccaaatcaaagccagcaagaccacagtcacaggagataaggactctgtgaacctgacctgctccacaaatgacactggaatctccatccgttggttcttcaaaaaccagagtctcccgtcctcggagaggatgaagctgtcccagggcaacaccaccctcagcataaaccctgtcaagagggaggatgctgggacgtattggtgtgaggtcttcaacccaatcagtaagaaccaaagcgaccccatcatgctgaacgtaaactataatgctctaccacaagaaaatggcctctcacctggggccattgctggcattgtgattggagtagtggccctggttgctctgatagcagtagccctggcatgttttctgcatttcgggaagaccggcagggcaagcgaccagcgtgatctcacagagcacaaaccctcagtctccaaccacactcaggaccactccaatgacccacctaacaagatgaatgaagttacttattctaccctgaactttgaagcccagcaacccacacaaccaacttcagcctccccatccctaacagccacagaaataatttattcagaagtaaaaaagcagtaatgaaacctgtcctgctcactgcagtgctgatgtatttcaagtctctcaccctcatcactaggagattcctttcccctctagggtagaggggtggggacagaaacaactttctcctactcttccttcctaataggcatctccaggctgcctggtcactgcccctctctcagtgtcaatagatgaaagtacattgggagtctgtaggaaacccaaccttcttgtcattgaaatttggcaaagctgactttgggaaagagggaccagaacttcccctcccttccccttttcccaacctggacttgttttaaacttgcctgttcagagcactcattccttcccacccccagtcctgtcctatcactctaattcggatttgccatagccttgaggttatgtccttttccattaagtacatgtgccaggaaacagcgagagagagaaagtaaacggcagtaatgcttctcctatttctccaaagccttgtgtgaactagcaaagagaagaaaaccaaatatataaccaatagtgaaatgccacaggtttgtccactgtcagggttgtctacctgtaggatcagggtctaagcaccttggtgcttagctagaataccacctaatccttctggcaagcctgtcttcagagaacccactagaagcaactaggaaaaatcacttgccaaaatccaaggcaattcctgatggaaaatgcaaaagcacatatatgttttaatatctttatgggctctgttcaaggcagtgctgagagggaggggttatagcttcaggagggaaccagcttctgataaacacaatctgctaggaacttgggaaaggaatcagagagctgcccttcagcgattatttaaattattgttaaagaatacacaatttggggtattgggatttttctccttttctctgagacattccaccattttaatttttgtaactgcttatttatgtgaaaagggttatttttacttagcttagctatgtcagccaatccgattgccttaggtgaaagaaaccaccgaaatccctcaggtcccttggtcaggagcctctcaagattttttttgtcagaggctccaaatagaaaataagaaaaggttttcttcattcatggctagagctagatttaactcagtttctaggcacctcagaccaatcatcaactaccattctattccatgtttgcacctgtgcattttctgtttgcccccattcactttgtcaggaaaccttggcctctgctaaggtgtatttggtccttgagaagtgggagcaccctacagggacactatcactcatgctggtggcattgtttacagctagaaagctgcactggtgctaatgccccttgggaaatggggctgtgaggaggaggattataacttaggcctagcctcttttaacagcctctgaaatttatcttttcttctatggggcttataaatgtatcttataataaaaaggaaggacaggaggaagacaggcaaatgtacttctcacccagtcttctacacagatggaatctctttggggctaagagaaaggttttattctatattgcttacctgatctcatgttaggcctaagaggctttctccaggaggattagcttggagttctctatactcaggtacctctttcagggttttctaaccctgacacggactgtgcatactttccctcatccatgctgtgctgtgttatttaatttttcctggctaagatcatgtctgaattatgtatgaaaattattctatgtttttataataaaaataatatatcagacatcgaaaaaaaaaa

SEQ ID NO: 703 - DNA, 1044 bp, Homo sapiens
  Genbank Accession No. X17567
gaattccctgaggaggcgaatccggcgggtatcagagccatcagaaccgccaccatgacggtgggcaagagcagcaagatgctgcagcatattgattacaggatgaggtgcatcctgcaggacggccggatcttcattggcaccttcaaggcttttgacaagcacatgaatttgatcctctgtgactgtgatgagttcagaaagatcaagccaaagaactccaaacaagcagaaagggaagagaagcgagtcctcggtctggtgctgctgcgaggggagaatctggtctcaatgacagtagagggacctcctcccaaagatactggtattgctcgagttccacttgctggagctgccgggggcccagggatcggcagggctgctggcagaggaatcccagctggggttcccatgccccaggctcctgcaggacttgctgggccagtccgtggggttggcgggccatcccaacaggtgatgaccccacaaggaagaggtactgttgcagccgctgcagctgctgccacagccagtattgccggggctccaacccagtacccacctggccgtgggggtcctcccccacctatgggccgaggagcaccccctccaggcatgatgggcccacctcctggtatgagacctcctatgggtcccccaatggggatcccccctggaagagggactccaatgggcatgccccctccgggaatgcggcctcctccccctgggatgcgaggccttctttgacccttggccacagagtatggaagtagctccgcagaggcgtgggctcgattcctcagggccacgttaccacagacctgtttgtttcttatgctgttgttcgtggagtctcatgggattgtctggtttcccttacagggccccctcccccgggaatgcgcccaccaaggccctagactcatcttggccctcctcagctccctgcctgtttcccgtaaggctgtacatagtccttttatctccttgtggcctatgaaactggtttataataaactcttaagagaacattataattgc

SEQ ID NO: 704 - DNA, 1797 bp, Homo sapiens
  Genbank Accession No. X51345
ccagcagggagctgggagctgggggaaacgacgccaggaaagctatcgcgccagagagggcgacgggggctcgggaagcctgacagggcttttgcgcacagctgccggctggctgctacccgcccgcgccagcccccgagaacgcgcgaccaggcacccagtccggtcaccgcagcggagagctcgccgctcgctgcagcgaggcccggagcggccccgcagggaccctccccagaccgcctgggccgcccggatgtgcactaaaatggaacagcccttctaccacgacgactcatacacagctacgggatacggccgggcccctggtggcctctctctacacgactacaaactcctgaaaccgagcctggcggtcaacctggccgacccctaccggagtctcaaagcgcctggggctcgcggacccggcccagagggcggcggtggcggcagctacttttctggtcagggctcggacaccggcgcgtctctcaagctcgcctcttcggagctggaacgcctgattgtccccaacagcaacggcgtgatcacgacgacgcctacacccccgggacagtacttttacccccgcgggggtggcagcggtggaggtgcagggggcgcagggggcggcgtcaccgaggagcaggagggcttcgccgacggctttgtcaaagccctggacgatctgcacaagatgaaccacgtgacaccccccaacgtgtccctgggcgctaccggggggcccccggctgggcccgggggcgtctacgccggcccggagccacctcccgtttacaccaacctcagcagctactccccagcctctgcgtcctcgggaggcgccggggctgccgtcgggaccgggagctcgtacccgacgaccaccatcagctacctcccacacgcgccgcccttcgccggtggccacccggcgcagctgggcttgggccgcggcgcctccaccttcaaggaggaaccgcagaccgtgccggaggcgcgcagccgggacgccacgccgccggtgtcccccatcaacatggaagaccaagagcgcatcaaagtggagcgcaagcggctgcggaaccggctggcggccaccaagtgccggaagcggaagctggagcgcatcgcgcgcctggaggacaaggtgaagacgctcaaggccgagaacgcggggctgtcgagtaccgccggcctcctccgggagcaggtggcccagctcaaacagaaggtcatgacccacgtcagcaacggctgtcagctgctgcttggggtcaagggacacgccttctgaacgtcccctgcccctttacggacaccccctcgcttggacggctgggcacacgcctcccactggggtccagggagcaggcggtgggcacccaccctgggacctaggggcgccgcaaaccacactggactccggcccccctaccctgcgcccagtccttccacctcgacgtttacaagcccccccttccacttttttttgtatgttttttttctgctggaaacagactcgattcatattgaatataatatatttgtgtatttaacagggaggggaagagggggcgatcgcggcggagctggccccgccgcctggtactcaagcccgcggggacattgggaaggggacccccgccccctgccctcccctctctgcaccgtactgtggaaaagaaacacgcacttagtctctaaagagtttattttaagacgtgtttgtgtttgtgtgtgtttgttctttttattgaatctatttaagtaaaaaaaaaattggttctttattaa

SEQ ID NO: 705 - DNA, 269 bp, Homo sapiens
  Genbank Accession No. X51441
ctgcagaagtgatcagcaatgccagagagaatatccagagattctttggccatggtgcggaggactcgctggccgatcaggctgccaatgaatggggcaggagtggcaaagaccccaatcacttccgacctgctggcctgcctgagaaatactgagcttcctcttcactctgctctcaggagatctggctgtgaggccctcagggcagggatacaaagcggggagagggtacacaatgggtatctaataaatacttaagaggtggaaaa

SEQ ID NO: 706 - DNA, 3132 bp, Homo sapiens
  Genbank Accession No. X52541
ccgcagaacttggggagccgccgccgccatccgccgccgcagccagcttccgccgccgcaggaccggcccctgccccagcctccgcagccgcggcgcgtccacgcccgcccgcgcccagggcgagtcggggtcgccgcctgcacgcttctcagtgttccccgcgccccgcatgtaacccggccaggcccccgcaacggtgtcccctgcagctccagccccgggctgcacccccccgccccgacaccagctctccagcctgctcgtccaggatggccgcggccaaggccgagatgcagctgatgtccccgctgcagatctctgacccgttcggatcctttcctcactcgcccaccatggacaactaccctaagctggaggagatgatgctgctgagcaacggggctccccagttcctcggcgccgccggggccccagagggcagcggcagcaacagcagcagcagcagcagcgggggcggtggaggcggcgggggcggcagcaacagcagcagcagcagcagcaccttcaaccctcaggcggacacgggcgagcagccctacgagcacctgaccgcagagtcttttcctgacatctctctgaacaacgagaaggtgctggtggagaccagttaccccagccaaaccactcgactgccccccatcacctatactggccgcttttccctggagcctgcacccaacagtggcaacaccttgtggcccgagcccctcttcagcttggtcagtggcctagtgagcatgaccaacccaccggcctcctcgtcctcagcaccatctccagcggcctcctccgcctccgcctcccagagcccacccctgagctgcgcagtgccatccaacgacagcagtcccatttactcagcggcacccaccttccccacgccgaacactgacattttccctgagccacaaagccaggccttcccgggctcggcagggacagcgctccagtacccgcctcctgcctaccctgccgccaagggtggcttccaggttcccatgatccccgactacctgtttccacagcagcagggggatctgggcctgggcaccccagaccagaagcccttccagggcctggagagccgcacccagcagccttcgctaacccctctgtctactattaaggcctttgccactcagtcgggctcccaggacctgaaggccctcaataccagctaccagtcccagctcatcaaacccagccgcatgcgcaagtatcccaaccggcccagcaagacgcccccccacgaacgcccttacgcttgcccagtggagtcctgtgatcgccgcttctcccgctccgacgagctcacccgccacatccgcatccacacaggccagaagcccttccagtgccgcatctgcatgcgcaacttcagccgcagcgaccacctcaccacccacatccgcacccacacaggcgaaaagcccttcgcctgcgacatctgtggaagaaagtttgccaggagcgatgaacgcaagaggcataccaagatccacttgcggcagaaggacaagaaagcagacaaaagtgttgtggcctcttcggccacctcctctctctcttcctacccgtccccggttgctacctcttacccgtccccggttactacctcttatccatccccggccaccacctcatacccatcccctgtgcccacctccttctcctctcccggctcctcgacctacccatcccctgtgcacagtggcttcccctccccgtcggtggccaccacgtactcctctgttccccctgctttcccggcccaggtcagcagcttcccttcctcagctgtcaccaactccttcagcgcctccacagggctttcggacatgacagcaaccttttctcccaggacaattgaaatttgctaaagggaaaggggaaagaaagggaaaagggagaaaaagaaacacaagagacttaaaggacaggaggaggagatggccataggagaggagggttcctcttaggtcagatggaggttctcagagccaagtcctccctctctactggagtggaaggtctattggccaacaatcctttctgcccacttccccttccccaattactattccctttgacttcagctgcctgaaacagccatgtccaagttcttcacctctatccaaagaacttgatttgcatggattttggataaatcatttcagtatcatctccatcatatgcctgaccccttgctcccttcaatgctagaaaatcgagttggcaaaatggggtttgggcccctcagagccctgccctgcacccttgtacagtgtctgtgccatggatttcgtttttcttggggtactcttgatgtgaagataatttgcatattctattgtattatttggagttaggtcctcacttgggggaaaaaaaaaaaaaaaagccaagcaaaccaatggtgatcctctattttgtgatgatgctgtgacaataagtttgaacctttttttttgaaacagcagtcccagtattctcagagcatgtgtcagagtgttgttccgttaacctttttgtaaatactgcttgaccgtactctcacatgtggcaaaatatggtttggtttttcttttttttttttgaaagtgttttttcttcgtccttttggtttaaaaagtttcacgtcttggtgccttttgtgtgatgccccttgctgatggcttgacatgtgcaattgtgagggacatgctcacctctagccttaaggggggcagggagtgatgatttgggggaggctttgggagcaaaataaggaagagggctgagctgagcttcggttctccagaatgtaagaaaacaaaatctaaaacaaaatctgaactctcaaaagtctatttttttaactgaaaatgtaaatttataaatatattcaggagttggaatgttgtagttacctactgagtaggcggcgatttttgtatgttatgaacatgcagttcattattttgtggttctattttactttgtacttgtgtttgcttaaacaaagtgactgtttggcttataaacacattgaatgcgctttattgcccatgggatatgtggtgtatatccttccaaaaaattaaaacgaaaataaagtagctgcgattggg

SEQ ID NO: 707 - DNA, 7260 bp, Homo sapiens
  Genbank Accession No. X57025
tcactgtcactgctaaattcagagcagattagagcctgcgcaatggaataaagtcctcaaaattgaaatgtgacattgctctcaacatctcccatctctctggatttccttttgcttcattattcctgctaaccaattcattttcagactttgtacttcagaagcaatgggaaaaatcagcagtcttccaacccaattatttaagtgctgcttttgtgatttcttgaaggtgaagatgcacaccatgtcctcctcgcatctcttctacctggcgctgtgcctgctcaccttcaccagctctgccacggctggaccggagacgctctgcggggctgagctggtggatgctcttcagttcgtgtgtggagacaggggcttttatttcaacaagcccacagggtatggctccagcagtcggagggcgcctcagacaggcatcgtggatgagtgctgcttccggagctgtgatctaaggaggctggagatgtattgcgcacccctcaagcctgccaagtcagctcgctctgtccgtgcccagcgccacaccgacatgcccaagacccagaaggaagtacatttgaagaacgcaagtagagggagtgcaggaaacaagaactacaggatgtaggaagaccctcctgaggagtgaagagtgacatgccaccgcaggatcctttgctctgcacgagttacctgttaaactttggaacacctaccaaaaaataagtttgataacatttaaaagatgggcgtttcccccaatgaaatacacaagtaaacattccaacattgtctttaggagtgatttgcaccttgcaaaaatggtcctggagttggtagattgctgttgatcttttatcaataatgttctatagaaaagaaaaaaaaatatatatatatatatatcttagtccctgcctctcaagagccacaaatgcatgggtgttgtatagatccagttgcactaaattcctctctgaatcttggctgctggagccattcattcagcaaccttgtctaagtggtttatgaattgtttccttatttgcacttctttctacacaactcgggctgtttgttttacagtgtctgataatcttgttagtctatacccaccacctcccttcataacctttatatttgccgaatttggcctcctcaaaagcagcagcaagtcgtcaagaagcacaccaattctaacccacaagattccatctgtggcatttgtaccaaatataagttggatgcattttattttagacacaaagctttatttttccacatcatgcttacaaaaaagaataatgcaaatagttgcaactttgaggccaatcatttttaggcatatgttttaaacatagaaagtttcttcaactcaaaagagttccttcaaatgatgagttaatgtgcaacctaattagtaactttcctctttttattttttccatatagagcactatgtaaatttagcatatcaattatacaggatatatcaaacagtatgtaaaactctgttttttagtataatggtgctattttgtagtttgttatatgaaagagtctggccaaaacggtaatacgtgaaagcaaaacaataggggaagcctggagccaaagatgacacaaggggaagggtactgaaaacaccatccatttgggaaagaaggcaaagtccccccagttatgccttccaagaggaacttcagacacaaaagtccactgatgcaaattggactggcgagtccagagaggaaactgtggaatggaaaaagcagaaggctaggaattttagcagtcctggtttctttttctcatggaagaaatgaacatctgccagctgtgtcatggactcaccactgtgtgaccttgggcaagtcacttcacctctctgtgcctcagtttcctcatctgcaaaatgggggcaatatgtcatctacctacctcaaaggggtggtataaggtttaaaaagataaagattcagatttttttaccctgggttgctgtaagggtgcaacatcagggcgcttgagttgctgagatgcaaggaattctataaataacccattcatagcatagctagagattggtgaattgaatgctcctgacatctcagttcttgtcagtgaagctatccaaataactggccaactagttgttaaaagctaacagctcaatctcttaaaacacttttcaaaatatgtgggaagcatttgattttcaatttgattttgaattctgcatttggttttatgaatacaaagataagtgaaaagagagaaaggaaaagaaaaaggagaaaaacaaagagatttctaccagtgaaaggggaattaattactctttgttagcactcactgactcttctatgcagttactacatatctagtaaaaccttgtttaatactataaataatattctattcattttgaaaaacacaatgattccttcttttctaggcaatataaggaaagtgatccaaaatttgaaatattaaaataatatctaataaaaagtcacaaagttatcttctttaacaaactttactcttattcttagctgtatatacatttttttaaaaagtttgttaaaatatgcttgactagagtttcagttgaaaggcaaaaacttccatcacaacaagaaatttcccatgcctgctcagaagggtagcccctagctctctgtgaatgtgttttatccattcaactgaaaattggtatcaagaaagtccactggttagtgtactagtccatcatagcctagaaaatgatccctatctgcagatcaagattttctcattagaacaatgaattatccagcattcagatctttctagtcaccttagaactttttggttaaaagtacccaggcttgattatttcatgcaaattctatattttacattcttggaaagtctatatgaaaaacaaaaataacatcttcagtttttctcccactgggtcacctcaaggatcagaggccaggaaaaaaaaaaaagactccctggatctctgaatatatgcaaaaagaaggccccatttagtggagccagcaatcctgttcagtcaacaagtattttaactctcagtccaacattatttgaattgagcacctcaagcatgcttagcaatgttctaatcactatggacagatgtaaaagaaactatacatcatttttgccctctgcctgttttccagacatacaggttctgtggaataagatactggactcctcttcccaagatggcacttctttttatttcttgtccccagtgtgtaccttttaaaattattccctctcaacaaaactttataggcagtcttctgcagacttaacatgttttctgtcatagttagatgtgataattctaagagtgtctatgacttatttccttcacttaattctatccacagtcaaaaatcccccaaggaggaaagctgaaagatgcaactgccaatattatctttcttaactttttccaacacataatcctctccaactggattataaataaattgaaaataactcattataccaattcactattttattttttaatgaattaaaactagaaaacaaattgatgcaaaccctggaagtcagttgattactatatactacagcagaatgactcagatttcatagaaaggagcaaccaaaatgtcacaaccaaaactttacaagctttgcttcagaattagattgctttataattcttgaatgaggcaatttcaagatatttgtaaaagaacagtaaacattggtaagaatgagctttcaactcataggcttatttccaatttaattgaccatactggatacttaggtcaaatttctgttctctcttgcccaaataatattaaagtattatttgaactttttaagatgaggcagttcccctgaaaaagttaatgcagctctccatcagaatccactcttctagggatatgaaaatctcttaacacccaccctacatacacagacacacacacacacacacacacacacacacacacacacacattcaccctaaggatccaatggaatactgaaaagaaatcacttccttgaaaattttattaaaaaacaaacaaacaaacaaaaagcctgtccacccttgagaatccttcctctccttggaacgtcaatgtttgtgtagatgaaaccatctcatgctctgtggctccagggtttctgttactattttatgcacttgggagaaggcttagaataaaagatgtagcacattttgctttcccatttattgtttggccagctatgccaatgtggtgctattgtttctttaagaaagtacttgactaaaaaaaaaagaaaaaaagaaaaaaaagaaagcatagacatatttttttaaagtataaaaacaacaattctatagatagatggcttaataaaatagcattaggtctatctagccaccaccacctttcaactttttatcactcacaagtagtgtactgttcaccaaattgtgaatttgggggtgcaggggcaggagttggaaattttttaaagttagaaggctccattgttttgttggctctcaaacttagcaaaattagcaatatattatccaatcttctgaacttgatcaagagcatggagaataaacgcgggaaaaaagatcttataggcaaatagaagaatttaaaagataagtaagttccttattgatttttgtgcactctgctctaaaacagatattcagcaagtggagaaaataagaacaaagagaaaaaatacatagatttacctgcaaaaaatagcttctgccaaatcccccttgggtattctttggcatttactggtttatagaagacattctcccttcacccagacatctcaaagagcagtagctctcatgaaaagcaatcactgatctcatttgggaaatgttggaaagtatttccttatgagatgggggttatctactgataaagaaagaatttatgagaaattgttgaaagagatggctaacaatctgtgaagattttttgtttcttggttttgtttttttttttttttttactttatacagtctttatgaatttcttaatgttcaaaatgacttggttcttttcttcttttttttatatcagaatgaggaataataagttaaacccacatagactctttaaaactataggctagatagaaatgtatgtttgacttgttgaagctataatcagactatttaaaatgttttgctatttttaatcttaaaagattgtgctaatttattagagcagaacctgtttggctctcctcagaagaaagaatctttccattcaaatcacatggctttccaccaatattttcaaaagataaatctgatttatgcaatggcatcatttattttaaaacagaagaattgtgaaagtttatgcccctcccttgcaaagaccataaagtccagatctggtaggggggcaacaacaaaaggaaaatgttgttgattcttggttttggattttgttttgttttcaatgctagtgtttaatcctgtagtacatatttgcttattgctattttaatattttataagaccttcctgttaggtattagaaagtgatacatagatatcttttttgtgtaatttctatttaaaaaagagagaagactgtcagaagctttaagtgcatatggtacaggataaagatatcaatttaaataaccaattcctatctggaacaatgcttttgttttttaaagaaacctctcacagataagacagaggcccaggggatttttgaagctgtctttattctgcccccatcccaacccagcccttattattttagtatctgcctcagaattttatagagggctgaccaagctgaaactctagaattaaaggaacctcactgaaaacatatatttcacgtgttccctctcttttttttcctttttgtgagatggggtctcgcactgtcccccaggctggagtgcagtggcatgatctcggctcactgcaacctccacctcctgggtttaagcgattctcctgcctcagcctcctgagtagctgggattacaggcacccaccactatgcccggctaattttttggatttttaatagagacggggttttaccatgttggccaggttggactcaaactcctgaccttgtgatttgcccgcctcagcctcccaaattgctgggattacaggcatgagccaccacaccctgcccatgtgttccctcttaatgtatgattacatggatcttaaacatgatccttctctcctcattcttcaactatctttgatggggtctttcaaggggaaaaaaatccaagcttttttaaagtaaaaaaaaaaaaagagaggacacaaaaccaaatgttactgctcaactgaaatatgagttaagatggagacagagtttctcctaataaccggagctgaattacctttcactttcaaaaacatgaccttccacaatccttagaatctgcctttttttatattactgaggcctaaaagtaaacattactcattttattttgcccaaaatgcactgatgtaaagtaggaaaaataaaaacagagctctaaaatccctttcaagccacccattgaccccactcaccaactcatagcaaagtcacttctgttaatcccttaatctgattttgtttggatatttatcttgtacccgctgctaaacacactgcaggagggactctgaaacctcaagctgtctacttacatcttttatctgtgtctgtgtatcatgaaaatgtctattcaaaatatcaaaacctttcaaatatcacgcagcttatattcagtttacataaaggccccaaataccatgtcagatctttttggtaaaagagttaatgaactatgagaattgggattacatcatgtattttgcctcatgtatttttatcacacttataggccaagtgtgataaataaacttacagacactgaattaatttcccctgctactttgaaaccagaaaataatgactggccattcgttacatctgtcttagttgaaaagcatattttttattaaattaattctgattgtatttgaaattattattcaattcacttatggcagaggaatatcaatcctaatgacttctaaaaatgtaactaattgaatcattatcttacatttactgtttaataagcatattttgaaaatgtatggctagagtgtcataataaaatggtatatctttctttagtaattacaaaaaaaaaaaaaaaaaaaaaaaa

SEQ ID NO: 708 - DNA, 1391 bp, Homo sapiens
  Genbank Accession No. X57129
ggacctgtgttacttcccttgtgaagaaacagaattatcatgaaaatttaggtggaaaccatttcgcttttttcttcaaaaataagggaagcatgtgcccaaccacccctgggaaaaagaaccttcaggggcaaaggagcgaacaggtaatttataagaaaaacagaaagtggtcttcttgactgccccagacttccttcggagttgggggaattggggacgcctggacgcgttgtttttgtgtttgtggaaaaaataaatgaaggagcatgaagcccgaggcttctgagatcctttcctgaccaaacccaagtgatttggtgtcggggaattttaatatttttccccttttgtgaggtggaacaaacacaacttgggagcagcgcagcggctcagagcctgccagccaggcgggcgaccagagcaccaatcagagcgcgcctgcgctctatatatacagcggccctgcccaggcgctgcttcatcggcgctttgccacttgtacccgagtttttgattctcaacatgtccgagactgctcctgccgctcccgctgccgcgcctcctgcggagaaggcccctgtaaagaagaaggcggccaaaaaggctgggggtacgcctcgtaaggcgtccggtcccccggtgtcagagctcatcaccaaggctgtggccgcctctaaagagcgtagcggagtttctctggctgctctgaaaaaagcgttggctgccgccggctatgatgtggagaaaaacaacagccgtatcaaacttggtctcaagagcctggtgagcaagggcactctggtgcaaacgaaaggcaccggtgcttctggctcctttaaactcaacaagaaggcagcctccggggaagccaagcccaaggttaaaaaggcgggcggaaccaaacctaagaagccagttggggcagccaagaagcccaagaaggcggctggcggcgcaactccgaagaagagcgctaagaaaacaccgaagaaagcgaagaagccggccgcggccactgtaaccaagaaagtggctaagagcccaaagaaggccaaggttgcgaagcccaagaaagctgccaaaagtgctgctaaggctgtgaagcccaaggccgctaagcccaaggttgtcaagcctaagaaggcggcgcccaagaagaaataggcgaacgcctacttctaaaacccaaaaggctcttttcagagccaccactgatctcaataaaagagctggataatttctttactatctgccttttcttgttctgccctgttacttaaggttagtcgtatgggagttactgaggtatcagacgaattgggtgacggggttggagagtggccgtggtgaggttacagcatttaaacctttattgcggcttctaggtc

SEQ ID NO: 709 - DNA, 1450 bp, Homo sapiens
  Genbank Accession No. X57348
ccaggcagcagttagcccgccgcccgcctgtgtgtccccagagccatggagagagccagtctgatccagaaggccaagctggcagagcaggccgaacgctatgaggacatggcagccttcccaggcagcagttagcccgccgcccgcctgtgtgtccccagagccatggagagagccagtctgatccagaaggccaagctggcagagcaggccgaacgctatgaggacatggcagccttcatgaaaggcgccgtggagaagggcgaggagctctcctgcgaagagcgaaacctgctctcagtagcctataagaacgtggtgggcggccagagggctgcctggagggtgctgtccagtattgagcagaaaagcaacgaggagggctcggaggagaaggggcccgaggtgcgtgagtaccgggagaaggtggagactgagctccagggcgtgtgcgacaccgtgctgggcctgctggacagccacctcatcaaggaggccggggacgccgagagccgggtcttctacctgaagatgaagggtgactactaccgctacctggccgaggtggccaccggtgacgacaagaagcgcatcattgactcagcccggtcagcctaccaggaggccatggacatcagcaagaaggagatgccgcccaccaaccccatccgcctgggcctggccctgaacttttccgtcttccactacgagatcgccaacagccccgaggaggccatctctctggccaagaccactttcgacgaggccatggctgatctgcacaccctcagcgaggactcctacaaagacagcaccctcatcatgcagctgctgcgagacaacctgacactgtggacggccgacaacgccggggaagaggggggcgaggctccccaggagccccagagctgagtgttgcccgccaccgccccgccctgccccctccagtccccgccctgccgagaggactagtatggggtgggaggccccacccttctcccctaggcgctgttcttgctccaaagggctccgtggagagggactggcagagctgaggccacctggggctggggatcccactcttcttgcagctgttgagcgcacctaaccactggtcatgcccccacccctgctctccgcacccgcttcctcccgaccccaggaccaggctacttctcccctcctcttgcctccctcctgcccctgctgcctcttgattcgtaggaattgaggagtgtctccgccttgtggctgagaactggacagtggcaggggctggagatgggtgtgtgtgtgtgtgtgtgtgtgtgtgtgtgcgcgcgcgccagtgcaagaccgagactgagggaaagcatgtctgctgggtgtgaccatgtttcctctcaataaagttcccctgtgacactcaaaaaaaaaaaaaaaaaaaaaaaaaaaaaaaaaaaaaaaaaaa

SEQ ID NO: 710 - DNA, 915 bp, Homo sapiens
  Genbank Accession No. X57809
ctgatttgcatggatggactctccccctctcagagtatgaagagagggagagatctgggggaagctcagcttcagctgtgggtagagaagacaggactcaggacaatctccagcatggccagcttccctctcctcctcaccctcctcactcactgtgcagggtcctgggcccagtctgtgctgactcagccaccctcagcgtctgggacccccgggcagagggtcaccatctcttgttctggaagccgctccaacgtcggaagtaataatgttaactggtaccagcagctcccaggaacggcccccaaactcctcatctatagtaataatcagcggccctcaggggtccctgaccgattctctggctccaagtctggcacctcagcctccctggccatcagtgggctccagtctgaggatgaggctgattattactgtgcaacatgggatgacagtactgtggtcttcggcggagggaccaagctgaccgtccctggtcagcccaaggctgccccctcggtcactctgttcccgccctcctctgaggagcttcaagccaacaaggccacactggtgtgtctcataagtgacttctacccgggagccgtgacagtggcctggaaggcagatagcagccccgtcaaggcgggagtggagaccaccacaccctccaaacaaagcaacaacaagtacgcggccagcagctatctgagcctgacgcctgagcagtggaagtcccacagaagctacagctgccaggtcacgcatgaagggagcaccgtggagaagacagtggcccctacagaatgttcataggttctcaaccctcaccccccaccacgggagactagagctgcaggatcccaggggaggggtctctcctcccaccccaaggcatcaagcccttctccctgc

SEQ ID NO: 711 - DNA, 1195 bp, Homo sapiens
  Genbank Accession No. X59766
cctggggacaatgtgggcttcaatgtcaagaatgttgcctgtcctgctgtctctgctgctgcttctgggtcctgctgtcccccaggagaaccaagatggtcgttactctctgacctatatctacactgggctgtccaagcatgttgaagacgtccccgcgtttcaggcccttggctcactcaatgacctccagttctttagatacaacagtaaagacaggaagtctcagcccatgggactctggagacaggtggaaggaatggaggattggaagcaggacagccaacttcagaaggccagggaggacatctttatggagaccctgaaagacattgtggagtattacaacgacagtaacgggtctcacgtattgcagggaaggtttggttgtgagatcgagaataacagaagcagcggagcattctggaaatattactatgatggaaaggactacattgaattcaacaaagaaatcccagcctgggtccccttcgacccagcagcccagataaccaagcagaagtgggaggcagaaccagtctacgtgcagcgggccaaggcttacctggaggaggagtgccctgcgactctgcggaaatacctgaaatacagcaaaaatatcctggaccggcaagatcctccctctgtggtggtcaccagccaccaggccccaggagaaaagaagaaactgaagtgcctggcctacgacttctacccagggaaaattgatgtgcactggactcgggccggcgaggtgcaggagcctgagttacggggagatgttcttcacaatggaaatggcacttaccagtcctgggtggtggtggcagtgcccccgcaggacacagccccctactcctgccacgtgcagcacagcagcctggcccagcccctcgtggtgccctgggaggccagctaggaagcaagggttggaggcaatgtgggatctcagacccagtagctgcccttcctgcctgatgtgggagctgaaccacagaaatcacagtcaatggatccacaaggcctgaggagcagtgtggggggacagacaggaggtggatttggagaccgaagactgggatgcctgtcttgagtagacttggacccaaaaaatcatctcaccttgagcccacccccaccccattgtctaatctgtagaagctaataaataatcatccctccttaaaaaaaaaaa

SEQ ID NO: 712 - DNA, 2152 bp, Homo sapiens
  Genbank Accession No. X62320
gctgctgcccaaggaccgcggagtcggacgcaggcagaccatgtggaccctggtgagctgggtggccttaacagcagggctggtggctggaacgcggtgcccagatggtcagttctgccctgtggcctgctgcctggaccccggaggagccagctacagctgctgccgtccccttctggacaaatggcccacaacactgagcaggcatctgggtggcccctgccaggttgatgcccactgctctgccggccactcctgcatctttaccgtctcagggacttccagttgctgccccttcccagaggccgtggcatgcggggatggccatcactgctgcccacggggcttccactgcagtgcagacgggcgatcctgcttccaaagatcaggtaacaactccgtgggtgccatccagtgccctgatagtcagttcgaatgcccggacttctccacgtgctgtgttatggtcgatggctcctgggggtgctgccccatgccccaggcttcctgctgtgaagacagggtgcactgctgtccgcacggtgccttctgcgacctggttcacacccgctgcatcacacccacgggcacccaccccctggcaaagaagctccctgcccagaggactaacagggcagtggccttgtccagctcggtcatgtgtccggacgcacggtcccggtgccctgatggttctacctgctgtgagctgcccagtgggaagtatggctgctgcccaatgcccaacgccacctgctgctccgatcacctgcactgctgcccccaagacactgtgtgtgacctgatccagagtaagtgcctctccaaggagaacgctaccacggacctcctcactaagctgcctgcgcacacagtgggggatgtgaaatgtgacatggaggtgagctgcccagatggctatacctgctgccgtctacagtcgggggcctggggctgctgcccttttacccaggctgtgtgctgtgaggaccacatacactgctgtcccgcggggtttacgtgtgacacgcagaagggtacctgtgaacaggggccccaccaggtgccctggatggagaaggccccagctcacctcagcctgccagacccacaagccttgaagagagatgtcccctgtgataatgtcagcagctgtccctcctccgatacctgctgccaactcacgtctggggagtggggctgctgtccaatcccagaggctgtctgctgctcggaccaccagcactgctgcccccagggctacacgtgtgtagctgaggggcagtgtcagcgaggaagcgagatcgtggctggactggagaagatgcctgcccgccgggcttccttatcccaccccagagacatcggctgtgaccagcacaccagctgcccggtggggcagacctgctgcccgagcctgggtgggagctgggcctgctgccagttgccccatgctgtgtgctgcgaggatcgccagcactgctgcccggctggctacacctgcaacgtgaaggctcgatcctgcgagaaggaagtggtctctgcccagcctgccaccttcctggcccgtagccctcacgtgggtgtgaaggacgtggagtgtggggaaggacacttctgccatgataaccagacctgctgccgagacaaccgacagggctgggcctgctgtccctaccgccagggcgtctgttgtgctgatcggcgccactgctgtcctgctggcttccgctgcgcagccaggggtaccaagtgtttgcgcagggaggccccgcgctgggacgcccctttgagggacccagccttgagacagctgctgtgagggacagtactgaagactctgcagccctcgggaccccactcggagggtgccctctgctcaggcctccctagcacctccccctaaccaaattctccctggaccccattctgagctccccatcaccatgggaggtggggcctcaatctaaggccttccctgtcagaagggggttgtggcaaaagccacattacaagctgccatcccctccccgtttcagtggaccctgtggccaggtgcttttccctatccacaggggtgtttgtgtgtgtgcgcgtgtgcgtttcaataaagtttgtacactttcaaaaaaaaaaaaaaaaaaaaaaaaaa

SEQ ID NO: 713 - DNA, 367 bp, Homo sapiens
  Genbank Accession No. X64177
ctccagtctcacctcggcttgcaatggaccccaactgctcctgcgaggctggtggctcctgcgcctgcgccggctcctgcaagtgcaaaaagtgcaaatgcacctcctgcaagaagagctgctgctcctgttgccccctgggctgtgccaagtgtgcccagggctgcatctgcaaaggggcgtcagagaagtgcagctgctgtgcctgatgtcgggacagccctgctgtcagatgaaaacagaatgacacgtaaaatccgaggttttttttttctacaactccgactcatttgctacattcctttttttctgtgaaatatgtgaataataattaaacacttagacttgaaaaaaaaaaaaaaaaaaa

SEQ ID NO: 714 - DNA, 439 bp, Homo sapiens
  Genbank Accession No. X65614
ggtgggtctgaatctagcaccatgacggaactagagacagccatgggcatgatcatagacgtcttttcccgatattcgggcagcgagggcagcacgcagaccctgaccaagggggagctcaaggtgctgatggagaaggagctaccaggcttcctgcagagtggaaaagacaaggatgccgtggataaattgctcaaggacctggacgccaatggagatgcccaggtggacttcagtgagttcatcgtgttcgtggctgcaatcacgtctgcctgtcacaagtactttgagaaggcaggactcaaatgatgccctggagatgtcacagattcctgcagagccatggtcccaggcttcccaaaagtgtttgttggcaattattcccctaggctgagcctgctcatgtacctctgattaataaatgcttatgaaaaaaaaa

SEQ ID NO: 715 - DNA, 6004 bp, Homo sapiens
  Genbank Accession No. X65965
  unsure (1)..(6004): n = a or c or g or t
aagcttgggaaactgggcaactttttctttatttttgtttttatttattattattttggagatggagtttagctctttcgccccaggctacagtgaagtggcttgatcttggcctcactgcagcctctgcccatcccggttcaagtgattctctgccctcagcctcccgagtagctgggattataggtgcctgccacatgcccggctaatttttttgtatttttagtagagaggagtttctccatgttggtcaggctggttttgaactcctgacctcaggtgatccacctgtcttggcctcccaaagtactaagattacaggtgtgagccaccgtgcctggccaacttattttttttctgagttcagtcttctagactatcggttaatacttttgaagttttgtcagttaccagaatatcagatatattcatatgcaaccagtggttttggtatgctgccattttgttaatctgtaccacattccacatttgtgcttataaggatgcatatcctattttaaacccgtagaataagagaagtgagattttgacccagttgatttagttgatgtgactaatctagaattatattctgtattactacagaataaaaggattacagctccttaaagtatacccttagttcagtcgtagagaaaactgcccatcaagacaggaagagctgggctgccttggagaagaacaatgactttattcccaaatggaggcgtagaagaaggagggtagaagtcaaaggaaatttctattcagggaaaagaaaaagctaacagaaagatgtatttttctttccttaacaagatagtaaacgtgagagtgggaatcctctaattctattcagggaaaagaaaaagctaacagagaaagtagtatttctttcctaacaaagatagtacagtgagtggggaaatccctctaacacgattcattaaaaaatgtgaactacgcagctggaggccattatcctaagcgaattaacccaggaacagaaaaccaaatagcccacatgtctcacttgcaagtggaagctaaacatggagtacttatggatataaaaatggcagcaacagacactgaggacagagcgggagggagaagaggggggttgaaactgttgtatacatgctcgctaccttggtgatggctacaattgcaccagacctcagctacatatgaaccgtgtacaactgtgctgtaccttgattaataattgaccggccannnnnnnnnnnnnnnnnnnnnnnnnnnnnnnnnnnnnnnnnaaatccgctgctcgggagctaggcaggagaaatgctgacctgggagggcagaggttgcagtgacccgagatcatggcattgcaactccgccctggggccaccaagagtgaaactccgtcttcaaaagggcaaaaaaacgaaaaaaaaaaaaaaaaaaaaaaaaaaaaagttgaagttataaaaaacaaaaacgtgaattaaaattgtgaaacttagatccaggtgtcgcattctgatgttgtctaatttcttgggccctatgacaaatatattttaatacatgtaatataacatgttactgataattattgaaactctgttcatttgtgggtgttttttaggattttttttttttaataggggagttgctggaagccatcaaacgtgactttggttcctttgacaagtttaaggagaagctgacggctgcatctgttggtgtccaaggctcaggttggggttggcttggtttcaataaggaacggggacacttacaaattgctgcttgtccaaatcaggatccactgcaaggaacaacaggttagatttaaaaattgtgatttcatttgggagagatgctctactgtaaagcattcaactagaaataaggaaaactaacagtgttttaagaacatgtaataatttgcaaatcttaacagataacacccagagtcttgtgtaagaaaaatgttttagaagtctgatatttcataaaattaagtacacgtaattttataggtacattaacaaacatgtttatttttatttattttttttgagacagactctactgttggcccccaggctggagtgcagtggtgcgatctcggnnnnnnnnnnnnnnnnnnnnnnnnnngttaattttcccagtctattttattgttagtatttgtcacattttctttgtaaacagtgaattaaaatattttataggtattcattcttatctagatttcctacttatataaaaaaacaagtgaatgagattgttacaaagggtaattttgtgtgagtagaataataaaagttgaaattgagaagatgcaatgttttagactgaaactgtggttggtttgttttccccttctttctaacaggccttattccactgctgggaattgatgtgtgggagcacgcttactaccttcagtataaaaatgtcaggcctgattatctaaaagctatttggaatgtaatcaactgggagaatgtaactgaaagatacatggcttgcaaaaagtaaaccacgatcgttatgctgagtatgttaagctgctctttatgactgtttttgtagtggtatagagtactgcagaatacagtaagctgctctattgtagcatttcttgatgttgcttagtcacttatttcataaaccaacttaatgttctgaataatttcttactaaacattttgttattgggcaagtgattgaaaatagtaaatgctttggtggattgaatctgattgggacatttcttcagagagctaaattacaattgcatttataaaaccatcaaaaatattccatccatatacttntggggacttgtagggatgcctttctagtcctatttattgagttatagaaaatctagtcttttgccccagttacttaaaaataaaatattaacactttcccaagggaaacactcggcttttctatagaaaattgcactttttgtcataatcctctgcagtgatacttctggtagatgtcacccagtggtttttgttaggtcaatgttcctgtatatagtttttgcaaatagagctgtatactgtttaaatgtagcaggtgaactgaactggggtttgcctcacctgcacagtaaaggcaaacttcaacagcaaaactgcaaaaaggtggtttttgcagtaggagaaaggaggatgtttatttgcagggcgccaagcaaggagaattgggcagctcatgcttgagcccaatctccatgatgcctacaagctagagtatttaaaggcagtggtaaatttcaggaaagcagaagttaaaggcaaaattgtaaatcagtcgagatcgggtgccttcagggtggtatggctagtataccaaaattgtaaatcactacatgaagcttatatattggtttggcctgaaaggtgaagtgggtaggcagggggcgggcttacaggttatggtggattcaaagactccctgatttgtgattggttaaggaagcaagctttgtctaaaaacttggggtccgcagaaaggaacattaaggtctggccaggcccctcaggaaagaaactgagagcaaagaatggaggtcagatttagtccctggtgttcccccttatctgacgtctgtgtgaatccatttggtgggggtctgggtttctgaaaagtagctcaggggcacgtgttaaggatgtctctaggtgactctaacttccctggctattgtttgaaactgttatgaccttcttgcttatcagcttgctggtttccttctcggggcgagctgggtgcctggagttttcggtgaaggaaactcaagattctcctttatttctgtgcttgtgggaatccccctgctcccaaagaggggtccctgactccgtctcacagggatctttttgtatatttggcttagcatcatacatttgccatgttgtttcatcatcttgcctaatttactgtttttgaatatttcatttgtttctaattgttactacagataatgctggggtgagcaactctgtgtacataggtttatctcctattggaatattttctttatataggcgttttttttttttctttttttttggagacagagcttgctctgttgcccaggctggagtgcaggtggccgcgacctggagctccactgcaacctccacttcccgggtccaagtgatgtcccaacctcagcctcctgaatagctgggattataggtgcatgctaccatgcctggctactttttgtatttttagcagagacagggtttcaccatgttggccagggtggtctcgaactcctgacctcaagtgatccgtctggctcagcctcccaaagtgctgggattacaggtgtgagccactgcacctggcctatataggcttttttcttaaacctatttagtaatgttttccaagtttcccaagttattttttattttaattttccccagttatttttctatttttttttcatggaaaaatggggtaacttagcagtttcaatattgaagactgaagtttaaaaaaatttaaattcaaggtacttttaaaattcagttagaaaagtaggctttaaaaattattagagacaagagtaccaaagcggtgtgtgtatgtgtgtgtgtgtatgcatgcttgtggattggaaaaactttggagactgattacttttcattatatatgtgtcacagtgaaacagcttttatgtgtcatgtaagattactgcttgcctctctaaggaaggtcgtgactgtttaaatagacgggcaaggtggaaccttttgaaagatgagcttttgaatataagttgtctgctagatcatggtttgtattgaactaacaaggtttgcagatctgctgacttatataaagctttttgattcctactaagctttaagatttaaaaaatgttcaatgttgaaatttctgtggggctctatttttgctttggctttctggtgagagagtgaggaagcattctttccttcactaagttttgtctttcttgtcttctggatagattgaattttaagagactaagggaatttacaaactaaggaatttagtcatctggtggaaaaggagactttaagattgttagggctgggcggggtgactcacatctgttaatcccctttgggcggccaaggcggcagaacacttgaaggagttcaagaccagcgtggccaacgtggtgaaaccctgtctctactaaaaaatacaaaattgtttagctctgtttttcataatagaaatagaaaaggtaaaattgcttttcttctgaaaagaacaagtattgttcatccaagaagggtttttgtgactgaatcagcagtgcctgcccatgtcatagctgtgcttcaaaaacctcagcatgattagttgtttggagcaaacaaggaagcaaagcaatacgtttttgaaattctatctgttgcttgactatattgtaataattaacattgaagttgagaaattcacaactttaattgtacacttcattgcaacttgaaattcatggtcttaaagtgagatttgaatttctattgagcgcctttaaaaaagtaataccaaaccataaagttaaaatctatgtatattgagtcatatctaaaaccacgtataaacataaattgtatttcctgttttaattccaggggaagtactgtttgggaaagctattattaggtaaatgttttacaaattactgtttctcactttcagtcaataccctaatgatcccagcaagataatgtcctgtcttctaagaggtgcatcaagcctggtacatactgaaaaccctataaggtcctggataatttttgtttgattattcattgaagaaacatttattttccaattgtgtgagtttttgactgttaataaaagaatctgtcaaccatcaaagaggtctgcattatgcttgcatgtcaaaaacattaaaaatcctataaatctactgtcattttcactgaagtttccaagggaaaggaattgtaattttgggctgttg

SEQ ID NO: 716 - DNA, 813 bp, Homo sapiens
  Genbank Accession No. X66141
ttctcgggaggcagtctgggtccttccaccatggcacctaagaaagcaaagaagagagccgggggcgccaactccaacgtgttctccatgttcgaacagacccaaatccaggaatttaaggaggccttcactatcatggaccagaacagggatggcttcattgacaagaacgatctgagagacacctttgctgcccttgggcgagtgaacgtgaaaaatgaagaaattgatgaaatgatcaaggaggctccgggtccaattaactttactgtgttcctctcaatgtttggggagaaacttaagggagcggaccctgaggaaaccattctcaacgcattcaaagtgtttgaccctgaaggcaaaggggtgctgaaggctgattacgttcgggaaatgctgaccacgcaggcggagaggttttccaaggaggaggttgaccagatgttcgccgccttcccccctgacgtgactggaaacttggactacaagaacctggtgcacatcatcacccacggagaagagaaggactaggagggggctcgctcgtggaccctgggctcgtctttgcagagtggtccctgccctcatctctctcccccgagtaccgcctctgtccctaccttgtctgttagccatgtggctgccccatttatccacctccatcttctttgcagcctgggtggctatgggtacttcgtggccgcacatcctacagttggaaatccatccagaggccatgttccaataaacaggaggtcgtgtatttggtcacgacatttctctgaaaaaaaaaaaaaaaaaaaaaaaaaaaaa

SEQ ID NO: 717 - DNA, 2390 bp, Homo sapiens
  Genbank Accession No. X66899
agagggagacggacgttgagagaacgaggaggaaggagagaaaatggcgtccacggattacagtacctatagccaagctgcagcgcagcagggctacagtgcttacaccgcccagcccactcaaggatatgcacagaccacccaggcatatgggcaacaaagctatggaacctatggacagcccactgatgtcagctatacccaggctcagaccactgcaacctatgggcagaccgcctatgcaacttcttatggacagcctcccactggttatactactccaactgccccccaggcatacagccagcctgtccaggggtatggcactggtgcttatgataccaccactgctacagtcaccaccacccaggcctcctatgcagctcagtctgcatatggcactcagcctgcttatccagcctatgggcagcagccagcagccactgcacctacaagaccgcaggatggaaacaagcccactgagactagtcaacctcaatctagcacagggggttacaaccagcccagcctaggatatggacagagtaactacagttatccccaggtacctgggagctaccccatgcagccagtcactgcacctccatcctaccctcctaccagctattcctctacacagccgactagttatgatcagagcagttactctcagcagaacacctatgggcaaccgagcagctatggacagcagagtagctatggtcaacaaagcagctatgggcagcagcctcccactagttacccaccccaaactggatcctacagccaagctccaagtcaatatagccaacagagcagcagctacgggcagcagagttcattccgacaggaccaccccagtagcatgggtgtttatgggcaggagtctggaggattttccggaccaggagagaaccggagcatgagtggccctgataaccggggcaggggaagagggggatttgatcgtggaggcatgagcagaggtgggcggggaggaggacgcggtggaatgggcagcgctggagagcgaggtggcttcaataagcctggtggacccatggatgaaggaccagatcttgatctaggccctcctgtagatccagatgaagactctgacaacagtgcaatttatgtacaaggattaaatgacagtgtgactctagatgatctggcagacttctttaagcagtgtggggttgttaagatgaacaagagaactgggcaacccatgatccacatctacctggacaaggaaacaggaaagcccaaaggcgatgccacagtgtcctatgaagacccacccactgccaaggctgccgtggaatggtttgatgggaaagattttcaagggagcaaacttaaagtctcccttgctcggaagaagcctccaatgaacagtatgcggggtggtctgccaccccgtgagggcagaggcatgccaccaccactccgtggaggtccaggaggcccaggaggtcctgggggacccatgggtcgcatgggaggccgtggaggagatagaggaggcttccctccaagaggaccccggggttcccgagggaacccctctggaggaggaaacgtccagcaccgagctggagactggcagtgtcccaatccgggttgtggaaaccagaacttcgcctggagaacagagtgcaaccagtgtaaggccccaaagcctgaaggcttcctcccgccaccctttccgcccccgggtggtgatcgtggcagaggtggccctggtggcatgcggggaggaagaggtggcctcatggatcgtggtggtcccggtggaatgttcagaggtggccgtggtggagacagaggtggcttccgtggtggccggggcatggaccgaggtggctttggtggaggaagacgaggtggccctggggggccccctggacctttgatggaacagatgggaggaagaagaggaggacgtggaggacctggaaaaatggataaaggcgagcaccgtcaggagcgcagagatcggccctactagatgcagagaccccgcagagctgcattgactaccagatttattttttaaaccagaaaatgttttaaatttataattccatatttataatgttggccacaacattatgattattccttgtctgtactttagtatttttcaccatttgtgaagaaacattaaaacaagttaaatggtagtgtgcggagtttttttttcttccttcttttaaaaatggttgtttaagactttaacaatgggaaccccttgtgagcatgctcagtatcattgtggagaaccaagagggcctcttaactgtaacaatgttcatggttgtgatgttttttttttttttttaaaataaaattccaaatgtttaataaaaaaaaaaaaaaaaaaa

SEQ ID NO: 718 - DNA, 1943 bp, Homo sapiens
  Genbank Accession No. X72841
gcctcgtcagctgcctgggcgggctgggaggcgcgggttgaaaagtctcgttccaagtttggagagagagagaagagcgcctcagacctcggtacccgcgagcggggaggaggcaggaaagaaggacgcggcgtctggggagcacccaggcagcaagacggggcccgggctttcgacagtggggagtgtgacgcgcttgggaaaggcaggagcgccacgtcgggctgctcttggctaacgagaggagtccgaggcggcggcgaggggcgaacgacccgacgcaagatggcgagtaaagagatgtttgaagatactgtggaggagcgtgtcatcaatgaagaatataaaatctggaagaagaatacaccgtttctatatgacctggttatgacccatgctcttcagtggcccagtcttaccgttcagtggcttcctgaagtgactaaacctgaaggaaaagattatgcccttcattggctagtgctggggactcatacgtctgatgagcagaatcatctggtggttgctcgagtacatattcccaatgatgatgcacagtttgatgcttcccattgtgacagtgacaagggtgaatttggtggctttggttctgtaacaggaaaaattgaatgtgaaattaaaatcaatcacgaaggagaagtaaaccgtgctcgttacatgccgcagaatcctcacatcattgctacaaaaacaccatcttctgatgtgttggtttttgactatacaaaacaccctgctaaaccagacccaagtggagaatgtaatcctgatctcagattaagaggtcaccagaaggaaggctatggtctctcctggaattcaaatttgagtggacatctcctaagtgcatctgatgaccatactgtttgtctgtgggatataaacgcaggaccaaaagaaggcaaaattgtggatgctaaagccatctttactggccactcagctgttgtagaggatgtggcctggcacctgctgcacgagtcattgtttggatctgttgctgatgatcagaaacttatgatatgggacaccaggtccaataccacctccaagccgagtcacttggtggatgcgcacactgccgaagtcaactgcctctcattcaatccctacagcgaatttattctagccaccggctctgcggataagaccgtagctttatgggatctgcgtaacttaaaattaaaactccataccttcgaatctcataaagatgaaattttccaggtccactggtctccacataatgaaactattctggcttcaagtggtactgaccgccgcctgaatgtgtgggatttaagtaaaattggggaagaacaatcagcagaagatgcagaagatgggcctccagaactcctgtttattcatggaggacacactgctaagatttcagattttagctggaaccccaatgagccttgggtcatttgctcagtgtctgaggataacatcatgcagatatggcaaatggctgaaaatatttacaatgatgaagagtcagatgtcacgacatccgaactggagggacaaggatcttaaacccaaagtacgagaaatgtttctgttgaatgtaatgctacatgaatgcttgatttatcaagcgccaaaaaggcattgtatagtaggaaatgtaagtggggtggcttatggcttctttatcctctgattctagcatttcaagtgagctgttgcgtactgtatcatattgtagctattagggaagagaagaatgttgcttaagaaagaacatcaccattgattttaaatacaagtagcagggtattgcctttgattcaactgttttaagtcctcattttctcaaactaagtgcttgctgttcccaaatatgcaagaataacttttacactttttccttccaacacttcttgattggctttgcagaaataaagttttaaaat

SEQ ID NO: 719 - DNA, 3151 bp, Homo sapiens
  Genbank Accession No. X76180
ccggccagcgggcgggctccccagccaggccgctgcacctgtcaggggaacaagctggaggagcaggaccctagacctctgcagcccataccaggtctcatggaggggaacaagctggaggagcaggactctagccctccacagtccactccagggctcatgaaggggaacaagcgtgaggagcaggggctgggccccgaacctgcggcgccccagcagcccacggcggaggaggaggccctgatcgagttccaccgctcctaccgagagctcttcgagttcttctgcaacaacaccaccatccacggcgccatccgcctggtgtgctcccagcacaaccgcatgaagacggccttctgggcagtgctgtggctctgcacctttggcatgatgtactggcaattcggcctgcttttcggagagtacttcagctaccccgtcagcctcaacatcaacctcaactcggacaagctcgtcttccccgcagtgaccatctgcaccctcaatccctacaggtacccggaaattaaagaggagctggaggagctggaccgcatcacagagcagacgctctttgacctgtacaaatacagctccttcaccactctcgtggccggctcccgcagccgtcgcgacctgcgggggactctgccgcaccccttgcagcgcctgagggtcccgcccccgcctcacggggcccgtcgagcccgtagcgtggcctccagcttgcgggacaacaacccccaggtggactggaaggactggaagatcggcttccagctgtgcaaccagaacaaatcggactgcttctaccagacatactcatcaggggtggatgcggtgagggagtggtaccgcttccactacatcaacatcctgtcgaggctgccagagactctgccatccctggaggaggacacgctgggcaacttcatcttcgcctgccgcttcaaccaggtctcctgcaaccaggcgaattactctcacttccaccacccgatgtatggaaactgctatactttcaatgacaagaacaactccaacctctggatgtcttccatgcctggaatcaacaacggtctgtccctgatgctgcgcgcagagcagaatgacttcattcccctgctgtccacagtgactggggcccgggtaatggtgcacgggcaggatgaacctgcctttatggatgatggtggctttaacttgcggcctggcgtggagacctccatcagcatgaggaaggaaaccctggacagacttgggggcgattatggcgactgcaccaagaatggcagtgatgttcctgttgagaacctttacccttcaaagtacacacagcaggtgtgtattcactcctgcttccaggagagcatgatcaaggagtgtggctgtgcctacatcttctatccgcggccccagaacgtggagtactgtgactacagaaagcacagttcctgggggtactgctactataagctccaggttgacttctcctcagaccacctgggctgtttcaccaagtgccggaagccatgcagcgtgaccagctaccagctctctgctggttactcacgatggccctcggtgacatcccaggaatgggtcttccagatgctatcgcgacagaacaattacaccgtcaacaacaagagaaatggagtggccaaagtcaacatcttcttcaaggagctgaactacaaaaccaattctgagtctccctctgtcacgatggtcaccctcctgtccaacctgggcagccagtggagcctgtggttcggctcctcggtgttgtctgtggtggagatggctgagctcgtctttgacctgctggtcatcatgttcctcatgctgctccgaaggttccgaagccgatactggtctccaggccgagggggcaggggtgctcaggaggtagcctccaccctggcatcctcccctccttcccacttctgcccccaccccatgtctctgtccttgtcccagccaggccctgctccctctccagccttgacagcccctccccctgcctatgccaccctgggcccccgcccatctccagggggctctgcaggggccagttcctccacctgtcctctgggggggccctgagagggaaggagaggtttctcacaccaaggcagatgctcctctggtgggagggtgctggccctggcaagattgaaggatgtgcagggcttcctctcagagccgcccaaactgccgttgatgtgtggaggggaagcaagatgggtaagggctcaggaagttgctccaagaacagtagctgatgaagctgcccagaagtgccttggctccagccctgtaccccttggtactgcctctgaacactctggtttccccacccaactgcggctaagtctctttttcccttggatcagccaagcgaaacttggagctttgacaaggaactttcctaagaaaccgctgataaccaggacaaaacacaaccaagggtacacgcaggcatgcacgggtttcctgcccagcgacggcttaagccagcccccgactggcctggccacactgctctccagtagcacagatgtctgctcctcctcttgaacttgggtgggaaaccccacccaaaagccccctttgttacttaggcaattccccttccctgactcccgagggctagggctagagcagacccgggtaagtaaaggcagacccagggctcctctagcctcatacccgtgccctcacagagccatgccccggcacctctgccctgtgtctttcatacctctacatgtctgcttgagatatttcctcagcctgaaagtttccccaaccatctgccagagaactcctatgcatcccttagaaccctgctcagacaccattacttttgtgaacgcttctgccacatcttgtcttccccaaaattgatcactccgccttctcctgggctcccgtagcacactataacatctgctggagtgttgctgttgcaccatactttcttgtacatttgtgtctcccttcccaactagactgtaagtgccttgcggtcagggactgaatcttgcccgtttatgtatgctccatgtctagcccatcatcctgcttggagcaagtaggcaggagctcaataaatgtttgttgcatgaaaaaaaaaaaaaaaaaa

SEQ ID NO: 720 - DNA, 415 bp, Homo sapiens
  Genbank Accession No. X76717
ccgctgcgtgttttcctcttgatcgggaactcctgcttctccttgcctcgaaatggaccccaactgctcctgctcgcctgttggctcctgtgcctgtgccggctcctgcaaatgcaaagagtgcaaatgcacctcctgcaagaagagctgctgctcctgctgccctgtgggctgtgcmaagtgtgcccagggctgcatctgcaaagggacgtcagacaagtgcagctgctgtgcctgatgccaggacagctgtgctctcagatgtaaatagagcaacctatataaacctggatttttttttttttttttttgtacaaccctgacccgtttgctacatctttttttctatgaaatatgtgaatggcaataaattcatctagactaaaaaaaaaaaaaaaaaaaaaaaaaaaaaaaa

SEQ ID NO: 721 - DNA, 2461 bp, Homo sapiens
  Genbank Accession No. X78706
  unsure (1)..(2461): n = a or c or g or t
agccttcgctgccaggaccgtggtgaagcctctgggcttcctgaagcccttctccttgatgaaggcttccagccgcttcaaggcacaccaggatgccctgccacggctgcccgtgccccctctccagcagtccctggaccactacctgaaggcgctgcagcccatcgtgagtgaggaggagtgggcccacaccaagcagctggtggatgagtttcaggcctcaggaggtgtaggggagcgcctgcagaaggggctggggcgtcgggccaggaagacggagaactggctgtctgagtggtggctcaagaccgcctacctccagtaccgccagcctgtggtcatctactcgagcccaggcgtgatgctacccaagcaggacttcgtggacctgcagggtcagctccgatttgctgccaaactcattgagggtgtgttggatttcaaggtcatgattgacaacgagaccctgcccgtggagtacctggnggggaagccactgtgcatgaaccagtactatcagatcttgtcctcctgccgagtgccgggccccaagcaggacacagtcagcaacttcagcaagaccaagaagcctcccacgcacatcaccgtggtacacaactaccagttttttgagctggatgtgtaccacagtgacgggacacccctcactgcggatcagatctttgtgcagctggagaagatctggaactcatccctacagaccaacaaggagcctgtgggcatcctcacctccaaccaccgcaactcctgggccaaggcatacaacaccctcatcaaagacaaggtgaaccgggattccgtgcgctccatccagaagagcatcttcaccgtgtgcctagatgcaaccatgcccagggtctcagaagacgtgtaccgcagccacgtggcaggccagatgctgcatgggggcggcagcaggctcaacagcggcaaccgctggtttgacaagacgctgcagttcatcgtggcagaagatggctcctgtgggcttgtgtacgagcatgctgcagcngagggtttccctattgtcacccttctggactatgtcatcgagtacacgaagaaacccgagcttgtgcngtctcccatggtgcccctgcccatgcccaagaagctgcggttcaacatcacccccgagatcaagagcgacatcgagaaggccaagcagaacctcagcatcatgatccannacctggatatcaccgtgatggtgttccaccattttggaaaagacttccccaagtcggagaagctaagcccagatgccttcatccagatggctttgcagctggcctactacaggatctacggacaggcatgtgccacctatgaaagtncntccctgcgcatgtttcacctgggccgcaccgacaccatccgctcggcttccatggactcactcacctttgtcaaggccatggatgactccagcgtcacggagcaccagaaggtggagctgctgcggaaggccgtgcaggcccaccggggctacaccgaccgggccatccgcggggaggcctttggtcgacacctgctgggcctgaagctgcaggccatcgaggacctggtgagcacgcccgacatcttcatggacacctcctacgccatcgccatgcacttccacctctccaccagccaggtccctgccaagacagactgtgtcatgttcttcgggcccgtggtccccgacggctacggtgtctgctataaccccatggaggcccacatcaacttctccctgtcggcctacaacagctgcgcggagaccaacgccgcccgcctggcgcattacctggagaaggcgctcctggacatgcgtgccctgctgcagagccacccccgggccaagctctgagcccctaggactcaggcctgccaatgccacagccaagcccaccctgggatgggccacccaccagggctcagctccttggttccctcttccttggttccctcttccctggtcccccnnaaatgtactgagccacggaccgcatcctccagggacctgcaggccccagccaagtgccttccgtgggtcatcccagcacctgccagggcccgacctggggctgagtgcagaggctgagcaggacgttaggcccgggcccctggcacgtcctccaccggtgcctcctctgggaaagggaaccaccctccagagcaggagactggcaagagctctttgtctcaccagctcagccccggccactccctgccaactccatgaccaggccaccatctgtaccctgcttcccaaactcccaggcctggagacaggattgtctggggncgaggggccagggtgtgaggtttcacctccgttgcggctgtgctcctgtggataacattgctagcgagccgcctctggttccactcagcttggttcctgcccccgccctgctgtatgatattaatgtggaaggtcatcaataaaggg

SEQ ID NO: 722 - DNA, 455 bp, Homo sapiens
  Genbank Accession No. X85373
tagacgccgggcctacagcgggaggctgaggaaagccgtgcgttgcgttccaaggacatctgtgagcccgcggagtatacaccatgagcaaagctcaccctcccgagttgaaaaaatttatggacaagaagttatcattgaaattaaatggtggcagacatgtccaaggaatattgcggggatttgatccctttatgaaccttgtgatagatgaatgtgtggagatggcgactagtggacaacagaacaatattggaatggtggtaatacgaggaaatagtatcatcatgttagaagccttggaacgagtataaataatggctgttcagcagagaaacccatgtcctctctccatagggcctgtttactatgatgtaaaaattaggtcatgtacattttcatattagactttttgttaaataaacttttgtaatagtcaaaaaaaaaaaaaaaaa

SEQ ID NO: 723 - DNA, 2489 bp, Homo sapiens
  Genbank Accession No. X85785
gatccagttcaaggggatggaggagcagtgagagtcagccgcccttccactccaatttcccagcacctcccttatctctgcctcacaagtcacccagcccccctctcttccttccttgtgcttgaagaatctctccttgctggaaagccccctgttttctcaatctccctttccacttcggtaaaatctctacttgctggaaagccccctgttttctcaatctccctttccacttcggtaaaatgcccactttctggtccccacctttttcctgagtgtagtcccaaccagccaaatccaacctcaaaacaggaagacccaaggccagtgacccccataggcctgaggcttgtgcaggcagtgggcgtggggtaaggcttcctgatgccccctgtccctgcccagaacctgatggccctcattagtccttggctcttatcttggaagcacaggcgctgacagccgtcccagcccttctgtctgcgggcctgaaccaaacggtgccatggggaactgtctgcacagggtgagtatggggccaggccccagagtcccttatccctatgcccctcatttcccctgctgtttgcccctcagtctttatatctcttccttttcctcctcatcttttctcccttcccgcttttttcctcttccttcaaagtctttttccttctctccttcctatgctagcctcctagctccctcttgtgtccctccctttgcctttgagtcagttccatcctggtctcttggtgcctttccttctgaccttgcactgctcctccagccccagctgccctggcttccccaggactgttcctgctccggctcttcaggctccctgctttgtccttttccactgtccgcactgcatctgactcctgcagagaccttgttctcccacccgaccttcctctctgtcctcccctcccacctgcccctcaattcccaggagactcttccggtgtaactctgatggcctcctctgggtatgtcctccaggcggagctctccccctcaactgagaactcaagtcagctggacttcgaagatgtatggaattcttcctatggtgtgaatgattccttcccagatggagactatgatgccaacctggaagcagctgccccctgccactcctgtaacctgctggatgactctgcactgcccttcttcatcctcaccagtgtcctgggtatcctagctagcagcactgtcctcttcatgcttttcagacctctcttccgctggcagctctgccctggctggcctgtcctggcacagctggctgtgggcagtgccctcttcagcattgtggtgcccgtcttggccccagggctaggtagcactcgcagctctgccctgtgtagcctgggctactgtgtctggtatggctcagcctttgcccaggctttgctgctagggtgccatgcctccctgggccacagactgggtgcaggccaggtcccaggcctcaccctggggctcactgtgggaatttggggagtggctgccctactgacactgcctgtcaccctggccagtggtgcttctggtggactctgcaccctgatatacagcacggagctgaaggctttgcaggccacacacactgtagcctgtcttgccatctttgtcttgttgccattgggtttgtttggagccaaggggctgaagaaggcattgggtatggggccaggcccctggatgaatatcctgtgggcctggtttattttctggtggcctcatggggtggttctaggactggatttcctggtgaggtccaagctgttgctgttgtcaacatgtctggcccagcaggctctggacctgctgctgaacctggcagaagccctggcaattttgcactgtgtggctacgcccctgctcctcgccctattctgccaccaggccacccgcaccctcttgccctctctgcccctccctgaaggatggtcttctcatctggacacccttggaagcaaatcctagttctcttcccacctgtcaacctgaattaaagtctacactgcctttgtgaagcgggtggtttcttattttgtctggggagaagaaggagaatggagagagagacatttttatgtcagactttcttgccagtgtctgcttctatagctggcttgggaagaaggtgaatgatgaataaataccctcagggtacacagatgttatattgaggtgtggggtcacggccatctcaagggagaagagaagaggaaccagagcatgaggggagtcattaaaccaaaaaaaacagaagggatggcttagctggaaaaaaagctgttatgggaagcaaatggaataggaactcaaactgagagataaacagtgaagagtgatgacaaagcccagagcaataccacctcccctgtccacctgcccagcctctgtcttctgtctcctctctggctttgtttagtgattaggcagtggtgggaggtgaagtagctaccagggtactt

SEQ ID NO: 724 - DNA, 81940 bp, Homo sapiens
  Genbank Accession No. X90568
attagaggctcaccgattcatgtcggagatggtcagaaaaaccaactctccataggacgtcgtttcagaagcaaccttgggcttagtcccaccctttttaggcactcttgagaaatcagagtgcctagaaagatgacaactcaagcaccgacgtttacgcagccgttacaaagcgttgtggtactggagggtagtaccgcaacctttgaggctcacattagtggttttccagttcctgaggtgagctggtttagggatggccaggtgatttccacttccactctgcccggcgtgcagatctcctttagcgatggccgcgctaaactgacgatccccgccgtgactaaagccaacagtggacgatattccctgaaagccaccaatggatctggacaagcgactagtactgctgagcttctcgtgaaagctgagacagcaccacccaacttcgttcaacgactgcagagcatgaccgtgagacaaggaagccaagtgagactccaagtgagagtgactggaatccctaaccctgtggtgaagttctaccgggatggagccgaaatccagagctcccttgatttccaaatttcacaagaaggcgacctctacagcttactgattgcagaagcataccctgaggactcagggacctattcagtaaatgccaccaatagcgttggaagagctacttcgactgctgaattactggttcaaggtgaagaagaagtacctgctaaaaagacaaagacaattgtttcgactgctcagatctcagaatcaagacaaacccgaattgaaaagaagattgaagcccactttgatgccagatcaattgcaacagttgagatggtcatagatggtgccgctgggcaacagctgccacataaaacacctcccaggattcctccgaagccaaagtcaagatccccaacaccaccgtctattgctgccaaagcacagctggctcggcagcagtccccatcgcccataagacactccccttccccggtcagacacgtgcgggcaccgaccccatctccggtcaggtccgtgtctccagcagcaagaatctccacatcccccatcaggtctgttaggtctccattgctcatgcgtaagactcaggcatccaccgtggccacaggtcctgaagtgcctcccccttggaagcaagagggctacgtggcctcctcatctgaggctgagatgagagagacaacgctgacaacctctactcagatcaggacagaagagagatgggaagggagatacggtgtccaggagcaagtgaccatcagtggtgctgcgggtgctgccgccagtgtgtcggccagtgctagctacgcagcagaggctgttgccactggtgctaaagaggtgaaacaagatgctgacaaaagtgcagctgttgcgactgttgttgctgccgttgatatggccagagtgagagaaccagtgatcagcgctgtagagcagactgctcagaggacaaccacgactgctgtgcacatccaacctgctcaagaacaggtaagaaaggaagcggagaagactgctgtaactaaggtagtagtggccgccgataaagccaaggaacaagaattaaaatcaagaaccaaagaaataattaccacaaagcaagagcagatgcacgtaactcatgagcagataagaaaagaaactgaaaaaacatttgtaccaaaggtagtaatttccgcagctaaagccaaagaacaagaaactagaatttctgaagaaattactaagaaacagaaacaagtaactcaagaagcaataatgaaggaaactaggaaaacagttgtacctaaagtcatagttgccacacccaaagtcaaagaacaagatttagtatcaagaggtagagaaggcattactaccaaaagagaacaagtgcaaataactcaggagaagatgagaaaggaagccgagaaaactgccttgtctacaatagcagttgctactgctaaagccaaagaacaagaaacaatactgagaactagagaaactatggctactagacaagaacaaatccaagttacccatggaaaggtggacgttggaaaaaaggctgaagctgtagcaacagttgttgctgcagtagaccaggcccgagtcagagagcccagagagcctgggcatcttgaagaatcctatgctcagcagaccactttggagtacggatataaggaacgcatttccgccgcaaaggtagctgagcctccccaacgtccagcctcagaaccccacgttgtccctaaagcagtcaagcctagagtaatccaggctccttctgagactcatatcaaaactactgatcaaaagggaatgcacatatcatcacagatcaagaaaactacagatctaacaacggaaagattagtccatgtggataaacgcccccgcacagctagccctcactttactgtttcaaaaatttctgttcctaagacagaacatggatatgaggcatcaatagccggtagtgctattgccacattacaaaaagagttgtcagccacatcttctgctcagaagatcaccaaatcggtgaaggctcctactgtgaagcccagtgagactagagtaagggcagagcccacacccttgccacagttccccttcgctgacacaccagatacttacaagagtgaagctggcgttgaggtgaaaaaggaagtaggggtgagcatcactggcaccaccgtccgtgaagagcgctttgaagtactgcacggacgcgaagccaaggtaacagaaacagcaagagtaccagcacctgttgaaattcctgttactccaccaactttggtctcgggcttaaaaaatgtgactgtcatagaaggtgaatctgtcaccttggagtgccacatctctggatacccatccccgacagtgacatggtacagggaagactaccaaatcgaaagttccattgacttccagataaccttccagagtggaattgctcgtcttatgattcgcgaagcatttgcggaagacagcgggcgatttacttgcagtgctgtaaatgaggctggaaccgtcagcacatcctgctatctggctgtgcaggtgtcagaagaatttgaaaaggaaaccacagccgtgactgagaaatttactacagaagagaaacgctttgttgagtcaagagatgtggttatgactgatactagcctcacagaggaacaagcagggcctggagaacctgccgcgccttactttattacaaaaccagtggtccagaaactggtggaaggtgggagcgtggtgtttggatgccaagttggcggcaacccaaagccccatgtatactggaaaaaatctggtgttcctctaaccactggatacagatacaaagtgagttacaacaaacaaaccggtgaatgcaagctggtgatttctatgacttttgctgatgatgctggagaatacactattgttgttcgcaataagcatggagaaacttctgcatctgcttccttgcttgaagaagctgattatgagttactgatgaagtcccagcaagaaatgctttatcagacacaagtgactgcatttgttcaagaacctgaagttggagaaacagcacctggatttgtatactctgagtatgaaaaagagtatgaaaaagaacaagccttaattaggaagaaaatggccaaagatactgtagtggtcagaacttatgtagaagatcaggaattccatatttcttcctttgaagagagacttattaaagaaattgaatatagaataataaagactacattagaagaacttcttgaagaagatggagaagaaaagatggcagttgacatttctgaatctgaagctgttgaatcaggatttgatttaagaatcaagaattatagaattcttgaggggatgggtgtcacttttcattgcaagatgtctggatatccattaccaaagattgcttggtacaaagatggcaagcgcatcaaacatggagaaagataccaaatggactttctacaagatggcagagctagtctgcgtatacctgttgttcttccagaagatgaaggaatctacactgcatttgccagcaatattaaaggaaatgcaatttgctcagggaaattgtatgtggagcctgctgcaccacttggagctccgacttacattcccacactagagccagtgagcagaatcagatctctctctccacgttcagtgagcaggtctcctatacgcatgtctcctgcacggatgtcacctgcaaggatgtctcctgcacggatgtcccctgcaagaatgtcccctggacgtaggctggaggagacagatgagtcacaacttgagagactatataaaccagtctttgtgttaaaacctgtttctttcaaatgtttagaaggggcaaactgcagatttgacttaaaggttgttggtagacctatgccagagacgttctggtttcatgatggccagcaaattgtcaatgactatacccataaagtagtcattaaagaagatggtactcaatcactaattattgtccctgccacacccagtgattctggggaatggactgtggttgcccaaaacagggcaggcagatcttcaatttcagtgattttaactgtggaagctgtggaacatcaggtaaaaccgatgtttgtagaaaaactgaaaaatgtcaatataaaggaaggttcccgacttgaaatgaaagtcagagctacgggtaaccccaaccctgacattgtatggttgaaaaacagtgacatcattgtgcctcataaatatcccaaaatcagaattgaaggaaccaagggagaagctgcccttaaaatcgattccactgtcagccaagattctgcctggtatactgcgactgctattaataaagctggcagagacactacaagatgcaaagtaaatgttgaagttgagtttgcagagcctgagccagagagaaagttaatcatcccacgggggacatatagagcaaaggagattgcagccccagaactggagcccctccatttgcgatatggccaagagcaatgggaagaaggtgatctctatgacaaagagaaacaacagaaaccatttttcaagaaaaaactcacttccttaagacttaagcgctttgggcctgcccactttgaatgcaggctaacacccattagtgacccaacgatggtggtggagtggctccatgatggaaagccacttgaagcagccaacaggctccgtatgatcaatgaatttgggtactgcagccttgattatggcgttgcatattctagagacagtggtatcattacttgcagagccactaacaaatatggaacagatcacacatctgctacccttattgttaaagatgagaaaagtcttgtggaagaatcccaattgcctgaggggaggaaaggcttacagagaattgaagaattagagagaatggctcatgaaggtgcacttacaggtgtaacaacagatcagaaagaaaagcaaaagccagacattgtcttgtacccagagccagttagagtacttgaaggggagactgcaaggttccgctgcagggtaacaggctaccctcagcccaaagtcaactggtacctcaatggacagctcatccgcaaaagcaaaaggttcagagttcgctatgatggtatccattacctggacatcgtggactgcaaatcatatgacacaggtgaagtgaaggtcaccgcggaaaatcctgaaggtgtgatagagcataaagtgaagcttgagattcaacagagggaagattttaggtctgtccttaggagagctcctgaaccaaggcctgagtttcacgtacatgaaccaggaaagcttcagtttgaagtacaaaaagtggatagacctgttgacaccactgaaaccaaagaagttgtgaagttgaaaagggctgaaagaattacccatgaaaaagtgcctgaagagtcggaagagctgcgcagtaaattcaagcgcagaacagaagagggctattatgaagccattaccgctgtggagctcaagtctcgaaagaaggatgaatcctatgaggaactcctcaggaagacaaaagatgaacttctccactggaccaaagagttaactgaagaggaaaagaaagctcttgccgaagaaggcaaaatcacgattccaacttttaaacctgacaagattgaactaagtcctagtatggaggctccaaaaatcttcgaaagaatccagagccaaacagtgggccaaggatctgatgcacacttccgggtcagagtcgtggggaaaccagaccccgaatgtgaatggtacaaaaatggtgtcaaaattgaacggtctgaccggatctactggtactggcccgaagacaatgtttgtgaattggtcataagagatgtgactgctgaggactctgccagcatcatggtaaaagccatcaacatagctggagaaacctccagtcacgcattcttacttgtccaagccaagcaattgatcactttcacacaggaattacaagatgttgttgctaaggaaaaagacactatggcaacctttgaatgtgaaacttcagaaccatttgtcaaagtgaaatggtataaagatggtatggaggttcatgagggagataaatacaggatgcactctgacagaaaggttcacttcctctccatactgaccattgatacgtctgatgctgaagattacagctgtgtacttgtggaagatgaaaatgtcaaaacgactgctaaacttattgttgaaggtgcagttgttgagtttgtgaaagaacttcaggacatagaagttccagaatcatattcaggagaattagagtgcattgtatccccagaaaatatagaaggaaaatggtatcataatgatgtggagcttaaatccaatggcaaatatacaattacatctcgtcgtggacgtcagaacctcacggtcaaggatgtaaccaaggaggaccagggagaatacagctttgtcatcgacgggaaaaagacaacctgtaaattaaagatgaaaccccgccccattgctatcctacaaggacttagtgaccaaaaagtctgtgagggtgacattgttcagcttgaagttaaagtctccttggaaagtgtggaaggcgtctggatgaaagacggccaagaagtgcagcccagtgacagggttcacattgtgatagacaaacaatctcatatgctgctcattgaagacatgactaaggaagatgctggaaattactctttcaccattccagcccttggcctctccaccagtgggcgtgtctctgtctatagtgtggacgtgataacacctctaaaagatgttaatgtgattgaaggcaccaaggctgtgcttgaatgtaaggtgtcagtccctgatgtgacttctgttaagtggtacttaaatgatgaacaaatcaagcctgatgaccgtgtacaggccattgtgaaaggtactaaacagcgactagtcattaaccgaactcatgcttcagacgaaggaccttataagctgatagttggcagagttgaaaccaactgtaatctctctgtagaaaaaattaaaattatcagaggtcttcgtgaccttacctgtacagaaactcaaaatgtggtgtttgaggttgagctgtcccactctggaattgatgtcctgtggaattttaaggacaaggaaatcaagcccagttctaaatataaaattgaagcacatggaaaaatatataaattgacagttctaaatatgatgaaagatgatgaaggaaaatacacattttacgcgggagaaaatatgacatctggaaaacttactgtggcaggtggggccatctccaagccactcacagatcagaccgtagctgaatcccaggaagctgtgtttgaatgtgaagttgccaacccagattccaaaggcgaatggttgagggatggcaaacacctaccactgactaacaacatcagaagtgagtctgatggccacaaaaggagacttatcattgctgccaccaaattagatgacattggagaatatacctacaaggtggccacctccaaaacatctgccaaactcaaagttgaagctgtcaaaattaagaagactctgaagaacctcacagtgacagaaacacaggatgctgttttcactgtcgagcttacacaccctaatgtcaaaggtgtccagtggatcaaaaatggagttgtgctggaatccaatgaaaagtatgctatctctgtcaaaggaacaatttactctctgaggattaaaaactgtgccatcgtggatgagtctgtttatggcttcaggcttggaaggcttggagccagtgccagactgcacgtggagactgtcaagatcattaaaaagccaaaggatgtgacagccttggaaaatgccactgttgcctttgaagttagtgtttcccatgacactgttccagtaaaatggttccataagagtgtggaaattaagccaagtgacaaacacagactggtctcagaaaggaaagtccacaagctgatgctgcagaacatctccccctcagatgctggggaatacacagctgtggtcgggcaattggaatgcaaagcaaaactgtttgtggagacattacatattacaaaaaccatgaaaaatatcgaggtgcctgagaccaaaactgcctcttttgagtgtgaggtgtcccacttcaatgtcccttccatgtggctgaagaatggtgtggaaattgagatgagtgaaaagttcaagatagttgtgcagggaaaactccatcagctgatcatcatgaacaccagcacagaggactcggcagaatacacatttgtctgtggcaatgaccaagtcagtgccaccctgacagtcactccaatcatgattacttccatgctgaaagacatcaacgctgaagaaaaagacactattacttttgaggtgacagtgaactatgaaggcatctcttacaaatggttaaagaatggtgtggaaatcaaatcaactgacaagtgccagatgagaaccaaaaagctcacacactcactgaacatcaggaatgttcactttggggatgctgctgactacacctttgtggctggaaaagcaacatcaacagccacactttatgtggaagctcgtcatatagaatttaggaaacacattaaggacattaaggtactggagaagaagcgagccatgtttgaatgtgaagtttctgaacctgacatcactgtacagtggatgaaagatgaccaggaactgcagatcacagacagaataaagattcagaaggagaaatatgtccaccgccttctgatcccatccacccggatgtctgatgctgggaagtacacagtggtggcaggaggcaacgtgtcaactgcaaaactctttgtagaaggcagagatgttcgcatccgaagtattaaaaaggaggttcaggtcattgagaaacagcgtgctgttgttgaatttgaggtcaatgaagacgatgttgatgcccactggtataaagatggcattgaaatcaatttccaagttcaagaacgacacaaatatgtagtggaaagaagaatccaccgaatgtttatctctgagaccagacagagcgatgcaggagaatacacctttgtggcaggaaggaacaggagttctgtcactctctatgtcaatgctcctgaaccgccccaagttctgcaggagctccagcctgtcactgtgcagtctggcaagcctgcccgcttctgtgccatgatatccggaagaccacagcccaaaatttcctggtacaaggaagagcagctgctttccactggcttcaagtgcaaatttcttcatgatgggcaagagtacacgcttttgctaattgaagccttcccagaggatgcggcagtctatacctgtgaagccaagaatgactatggtgttgccacaacatcagcttcactctcagtggaagttccagaagttgtgtctcctgatcaggaaatgcctgtttatccacctgccatcatcaccccgcttcaggacactgtcacttctgaagggcagccagcccgttttcaatgccgggtttctggaacagatctaaaagtgtcgtggtacagcaaagacaagaaaatcaagccatctcggttctttagaatgactcaatttgaagacacttatcaactggaaattgccgaagcttatccagaagatgaaggaacttacacgtttgttgctaataatgctgtaggccaagtatcaagcacagccaacctgagtctggaagctcctgaatcaattttgcatgagaggattgaacaagagattgagatggaaatgaaagagttttctagttcttttctgtctgccgaggaagaaggacttcatagcgccgaacttcaattatctaaaataaatgaaacacttgaacttttgtctgaatctccagtttacccaactaaatttgattccgaaaaggaaggcactggcccaattttcatcaaagaagtgtcaaatgctgatataagcatgggggatgtggctacactgtctgtaactgtcattggcatccccaaacctaaaattcagtggttctttaatggagtgctattaaccccttctgctgactacaaatttgtttttgacggtgatgatcatagcctgatcattctgttcaccaaattggaggatgagggagagtatacatgtatggccagtaatgactatggaaagacaatatgtagtgcctatctaaaaattaattccaaaggagagggtcacaaagacactgaaacagaatcagcagtggcaaaatctctggaaaagctgggaggtccttgtcctcctcacttccttaaggagttaaaaccaattcgctgtgctcaagggcttcctgccatctttgagtacacagtggttggagagcctgcccctactgttacatggttcaaagaaaacaagcagctttgcaccagtgtttattacactatcattcataaccctaatggctctggaactttcattgtcaatgaccctcagagggaagacagtggcctctatatctgtaaagcagagaatatgttgggtgagtccacctgtgcagcagagctgcttgtgcttctggaagacacagacatgactgataccccctgcaaagcaaagtccacaccagaggctcctgaggattttccacagacacccttaaagggtcccgcagttgaagcacttgactcggagcaggaaattgcaacgtttgtaaaagacaccattttgaaagctgctttaattacagaagaaaaccagcaactatcttatgagcatattgctaaagccaatgaattgagcagtcagcttcctttgggagctcaggaattgcaatccattttggagcaagacaagctcactcctgaaagcaccagggaatttctttgcatcaatggcagtattcactttcagcctctcaaggaaccatctcccaacctacagctgcagattgtacagtcccagaaaaccttctccaaagaaggtattctaatgcctgaagagcctgagacacaggcagttctatcagataccgagaaaatcttcccaagtgccatgtccatagaacaaattaattcattaacagttgagcctctgaaaactttattagctgaacctgaagggaattatccacagtcttcaatagaacctccaatgcattcttatctaacctctgtggctgaggaagtactttcactaaaagaaaagacagtatctgacaccaacagagagcaaagagtgactcttcaaaagcaagaggcacaaagtgcgctcatcttgagtcagagcttagctgagggacacgtggagagtctccagagtcctgatgtcatgatctctcaggtaaactatgagcccctagtcccttcagaacactcatgcacagaaggaggtaaaattttgatagaaagtgcaaatccactggaaaatgcagggcaagattctgcggtcagaattgaggaaggcaagtccttaagatttccactagcacttgaagaaaagcaggtactgctcaaagaagagcattctgacaacgtggtgatgcccccagaccaaatcattgagtctaaaagagagcccgtggcaataaagaaagtgcaggaggtacagggaagggaccttctttctaaggaaagcttgctttctggtattccagaagagcagagattaaacctgaaaattcaaatctgccgggctttgcaagcagccgtggccagcgagcagccaggtcttttctctgagtggctaagaaatattgaaaaggtggaggtcgaggctgtaaacatcacccaagagcccagacacatcatgtgcatgtaccttgttacttcggcaaagtctgtaacagaagaagtaaccatcattattgaagatgttgatcctcaaatggctaacctgaaaatggaacttagggatgctttgtgtgctattatatatgaggaaatagacatcctaacagctgagggtcctagaattcagcaaggagccaaaacaagtttgcaagaagaaatggattctttttcaggttcacagaaggttgaacccattactgaaccagaagttgaatctaaatatctgatctcaactgaagaggtcagttattttaacgtgcaaagtagggttaaatatttggatgccacacctgtcactaaaggggttgcttcagctgttgtctctgacgaaaaacaagatgagagtctgaaaccatcagaggaaaaagaggagtcttcctctgaaagtggtactgaggaggttgctacagtaaagatacaggaagctgagggtggcttaatcaaagaggatggccccatgatacatacacctttagtggacactgtttctgaggaaggtgatattgtacacctcacaacatccataacaaatgctaaagaggtgaattggtattttgagaataaactggtgccttcagatgaaaagttcaagtgtttacaagatcaaaatacatatacgctagtcatcgacaaagtaaataccgaagaccatcaaggagagtatgtctgtgaggccttgaatgacagcggaaaaacagcaacttcagccaaactcactgtagtaaaaagagctgccccagtgatcaagaggaaaatcgaacccctggaagtagcactgggccacctagccaaattcacctgtgagatccaaagtgctcccaatgtccggttccagtggtttaaagctggccgagaaatttatgagagtgacaagtgttctattcgatcttcaaagtatatctccagccttgaaatcctgagaacccaggtggttgactgcggcgagtatacatgcaaagcttccaatgagtatggcagtgtcagctgtacagccacactaactgtgacagtgcctggaggtgaaaagaaagttcgcaaattacttccggaacgtaaacctgaaccaaaggaagaagttgttctgaaaagcgttctaagaaaaagacctgaagaagaagaacctaaagtagaacctaaaaaactagaaaaagttaaaaaacctgcagtaccagaaccaccacctccaaaacctgttgaagaggttgaagtacctactgttacaaaaagggaaaggaagattcctgaaccaacaaaagtgcctgaaatcaagccagcaatacctctccctgcacctgaaccgaaaccaaagcccgaagcagaagtgaaaacaatcaaaccacctcctgtggaacctgaaccaacccccatcgctgccccagtaacagtgccagtggttggaaagaaagcagaagccaaagcacctaaggaagaggctgccaagccaaaaggtcctatcaaaggtgtacccaaaaagactccttcaccaatagaagccgaaaggagaaagttaaggccaggaagtggtggagagaaacctcctgatgaagccccgttcacctaccagctaaaggctgtgccactgaagtttgtgaaagaaatcaaagacatcatcttgacagaatcagagttcgttggctcttcagcaatctttgaatgtttggtctccccttccactgcaattacaacctggatgaaagacggtagcaatatccgtgagagtcccaagcacaggtttattgcagatggtaaagacagaaagctgcacatcattgatgttcaactttccgatgctggtgaatacacctgtgttttacgtttgggaaacaaagaaaagacctccacggctaaacttgttgtagaagaacttcctgtgcgttttgtaaaaacactggaagaggaagtcacagtggtcaaaggacagccattgtacttgagctgcgagttaaacaaagagcgtgacgtggtctggaggaaggatggcaagattgtggtggagaaacctggccgaattgtgccaggcgtcattggcttgatgcgggctctgaccatcaacgatgcagatgacacagatgctggaacatacacagttactgtggaaaacgccaacaacctggagtgttcatcttgcgtaaaagtagtagaagtcattagagattggctggtgaaacctatacgagaccagcatgtgaaacccaaggggacagctatttttgcctgtgatatagcaaaagatactccaaacattaagtggttcaaaggatatgatgaaatccctgcggaaccaaatgataagactgaaatactgagagatggaaatcatctgtacctcaaaattaagaatgctatgccagaagatattgctgagtatgcagtggaaattgaaggaaaaagataccctgcaaagctgacacttggagagcgtgaagttgaactgcttaaaccaatagaggacgttaccatttatgagaaagaaagtgcaagctttgatgcagaaatctcagaggcagacattcctggacaatggaaactgaaaggagaacttctaaggccctcacctacttgtgaaatcaaagcagaaggtggaaaacgcttcttaactttgcacaaagtcaaactggaccaagctggtgaagtcctctaccaggcccttaatgcaattacaactgccattttgacagtaaaagaaatcgaacttgactttgctgtgcccctgaaggatgtcactgttccagaaaggcgacaggctcgattcgaatgtgtcctcacccgagaggcaaatgttatatggtccaaaggacctgatataattaagtcatctgacaaatttgatatcatcgctgatggaaagaaacatattcttgttattaatgattctcaatttgatgatgaaggggtctatactgctgaggtggagggcaagaagacctcagctcggttgtttgtcacaggtataagactgaaattcatgtcacctcttgaagatcaaacagtaaaagaaggtgaaacagcaacttttgtttgtgaactttctcatgaaaaaatgcatgtagtctggttcaaaaatgatgccaaactccatacaagcagaacagtactcatctcttctgagggcaagactcacaaattggaaatgaaagaagtgacattggatgatatatctcagataaaagctcaagtcaaggagctgagctccacagcacagctgaaggtcttagaggccgatccctacttcactgtgaaattacatgacaaaactgcagtggagaaggatgagattactttgaagtgtgaagtgagcaaagatgtaccagtgaaatggttcaaagatggtgaagagattgtcccttcacccaaatattctatcaaggcagatggcctgcgccgcatcttaaaaatcaaaaaggcggaccttaaagataaaggcgaatatgtgtgtgactgtggcacagacaagaccaaggcaaatgttactgttgaggctcgactaatagaagtggaaaagcctctgtacggagtagaggtgtttgttggtgaaacagcccactttgaaattgaactttctgaacctgatgttcacggccagtggaagctgaaaggacagcctttgacagcttcccctgactgtgaaatcattgaggatggaaagaagcatattctgatccttcataactgtcagctgggtatgacaggagaggtttccttccaggctgctaatgccaaatctgcagccaatctgaaagtgaaagaattgcctcttatcttcatcacacctctcagtgatgttaaagtcttcgagaaagatgaggctaagtttgagtgtgaagtatccagggagcccaaaacattccgttggctaaaaggaacccaggaaatcacaggtgatgacagatttgagcttataaaggatggcactaagcattcaatggtgatcaagtcagctgcttttgaagatgaagcaaaatacatgtttgaagctgaagataagcacacaagtggcaaactgatcattgaaggaatccggctcaaattcctcacccctctcaaagatgtaactgccaaagagaaggaaagtgctgtatttactgtggagttatctcatgataacatccgagttaaatggttcaagaatgaccagcgcctacacaccaccaggtcggtctcaatgcaagacgaagggaaaactcattcgatcacattcaaagacctgtctattgatgacacctcccaaattagagtagaagctatggggatgagttcagaagctaaactcactgtgcttgagggagacccatattttacaggaaaacttcaagattatactggtgtagagaaagatgaagttattctacagtgtgaaattagcaaagcagatgcaccagtgaaatggtttaaggatgggaaggaaataaagccatccaaaaatgctgttattaagacagatggcaagaaacgcatgctaatcctaaagaaagccttgaaatcagatattggacagtacacctgtgactgtgggacagataagacctcaggaaaacttgacattgaggatcgggaaattaaactggtgcgacccctgcacagtgtggaggtgatggagactgagacagcacgctttgaaaccgaaatctctgaagatgatatccacgccaactggaaactcaagggagaggccctactccaaacacctgattgtgaaattaaggaagaaggcaaaatacactcccttgttttgcacaactgtcgcctggaccagacgggtggggtggatttccaagctgccaatgttaaatctagtgcccacctccgagttaagccacgagtaattggtcttctgaggcctttaaaggatgtcaccgtgactgcaggggaaacagccaccttcgactgcgagctctcctacgaagatatcccagtggaatggtatctcaaagggaagaaactagagcccagcgataaggtggtcccacgttcagaaggaaaagttcatacacttactctgagggatgtaaagttagaagatgctggggaagtccaactaacagcaaaagatttcaaaactcacgccaacctctttgtgaaagaacccccagttgaattcactaagcctcttgaggaccagacggtcgaagagggagccactgcagtgctggagtgtgaagtctccagagaaaatgctaaggtgaaatggttcaaaaatgggacagaaatcctcaaaagcaagaagtatgaaattgttgctgatggcagggtcagaaaacttgttatacatgactgtaccccagaggatattaaaacatacacttgtgatgctaaggattttaagacttcctgtaacctgaatgtcgtgcctcctcatgtggaattcttaagaccactcaccgaccttcaagttagagaaaaagaaatggctcgatttgagtgtgaactttcccgagaaaatgctaaggttaagtggtttaaagatggtgctgaaattaaaaagggcaaaaaatatgacatcatatccaagggagcagtgcgcattcttgtcatcaacaaatgtctactggatgatgaagctgaatattcctgtgaagtaaggacagcgagaacttctggcatgctgacagttctggaagaagaagctgtctttaccaaaaatcttgccaacattgaagttagtgaaacagacactataaaactggtttgtgaagtctccaaacctggcgcagaagtgatttggtataaaggggatgaggagatcattgaaacaggaagatatgaaatactgactgaaggacggaagagaatcctggtcattcagaacgctcaccttgaggatgctggcaactacaactgtcgactcccaagctctcgaaccgatggcaaagtcaaagtacatgaactggctgctgaatttatctcaaagcctcaaaaccttgaaatacttgaaggagaaaaggctgaatttgtctgctctatatcaaaagaaagctttccagtccagtggaagagggatgataagacacttgaatctggagataaatatgacgttattgctgatggtaaaaagagggtcctagttgtgaaagatgccacattacaagatatgggcacttacgttgtcatggtaggggccgccagagcagcagctcacttgacagtcattgaaaaactcaggatcgtagttcctcttaaggacacccgggtgaaggaacaacaggaagttgtcttcaactgtgaagtcaatactgaaggtgccaaagccaaatggttcagaaatgaagaagctatatttgatagttcaaaatacatcattctccaaaaagacctagtctacaccctcagaattagagatgcacacttagatgaccaagccaactataatgtgtctttgaccaatcacagaggtgaaaatgttaaaagtgcagccaatctaatagtagaagaggaagaccttaggattgttgagcctcttaaagatattgaaacaatggagaagaaatctgtcacattctggtgcaaggtgaatcgtctcaatgtaacactgaagtggaccaaaaatggtgaagaagtgccttttgacaaccgtgtctcatacagagttgataagtacaagcacatgttaaccattaaagactgtggcttcccagatgaaggtgaatacattgtcactgctggacaagataaatctgttgctgagcttctcatcatagaagccccgacagaatttgtggaacacttggaagatcagacagtcactgagttcgatgacgctgtcttctcctgccagctctccagagagaaagccaatgtaaaatggtacagaaatgggagagaaatcaaagaaggcaaaaaatacaaatttgaaaaagatggaagtatacacagactcattataaaagattgcaggctggatgatgagtgtgaatatgcttgcggggtagaagacaggaagtctcgtgctagactttttgtggaagaaattcctgttgagatcatcaggcctccacaagatattcttgaagcccctggtgctgatgttgtctttttagcagaactcaataaagataaggtggaagtccaatggctaagaaataacatggttgttgtccagggtgataaacaccagatgatgagtgaaggaaagatacatcgactacagatttgtgatattaagccccgtgaccagggtgaatacagatttattgccaaagacaaagaagccagagctaagcttgaactggcagctgcaccaaaaatcaagacagctgaccaagaccttgtggttgatgttggcaagcctctgacaatggtggtgccatatgatgcctaccccaaagcagaagctgaatggtttaaagaaaatgaacctttatctacaaaaaccattgatactacggctgaacaaacttctttcagaattttagaagccaagaaaggagacaaagggaggtataaaattgtgcttcagaacaaacatggaaaagcagaaggattcatcaatttaaaagttattgatgttcctgggccagtacgtaacttagaagtgacagaaacatttgatggtgaagtgagccttgcttgggaagaacctttaactgatggtggaagcaaaatcataggttacgttgttgaaagacgtgacattaagagaaagacctgggttctggccacagaccgtgcagagagttgtgagtttactgtcactggtctacagaaaggaggagttgagtacctattccgtgtgagtgcaagaaacagagttggcactggtgagccagtagaaactgacaatcctgtagaagcaaggagtaaatatgatgttccaggccctcctttgaatgtaaccatcactgatgtgaatcgatttggtgtctcactgacatgggaaccaccagagtatgatggaggtgctgagatcacaaactacgtcattgaattaagagacaagacttctatcaggtgggatactgccatgactgtgagagctgaagacctgtctgcaactgttactgatgtggtagaaggacaggagtacagtttccgagtgagagcccaaaatcgaattggagttggaaaaccaagtgcagccacacccttcgtcaaagttgctgatccaattgagagaccaagtcctcctgtaaacctaacttcctcagatcagactcagtcatcagttcagctcaaatgggaacctcctctgaaagatggaggaagcccaatattaggctatataattgagcgatgcgaagaaggaaaagataattggattcgttgcaatatgaaacttgtccctgaactgacttacaaggttaccggattggaaaaaggaaataaatatttatatagagtatctgcagaaaataaagctggtgtttcagatccatctgaaattcttggtcctctcaccgctgacgatgcatttgttgaaccaacaatggatttaagtgcatttaaagatggtctggaagttattgtcccaaatcctatcacgatcctggttccaagtacaggctatccaaggccaactgcaacctggtgttttggagataaagtactagaaacaggggaccgggtgaaaatgaagaccttgtctgcctatgccgaacttgtcatttctccaagtgaacgttcagacaagggcatttatacactgaaattagaaaaccgtgtgaaaacaatttctggggaaattgatgtcaatgtaattgctcgcccaagtgcacccaaagaattgaaatttggtgatataaccaaggactcagtacatttgacttgggaaccacctgatgatgatggaggaagtccgttaactggatacgttgttgaaaaacgagaagtcagccggaaaacatggactaaagttatggactttgtgactgatctagaattcacagttcctgatcttgttcaaggaaaagagtacttatttaaagtttgtgctcgtaacaaatgtggccctggagaacctgcatatgttgatgaacctgtaaatatgtcaactcctgcaacggtacctgacccaccagagaatgttaaatggagagatcgaacagccaatagcatcttcttaacatgggatccacctaaaaatgatggtggttcacgcatcaaaggatatatagttgaaagatgtccacgtggttctgataaatgggttgcctgtggagaacctgttgcagaaacaaaaatggaagtgacaggtcttgaggaaggcaaatggtatgcctaccgcgtgaagaccttaaacaggcagggtgctagcaaaccaagcagacccacagaggaaatccaggctgtggacacacaagaggccccagaaatcttcctcgatgtgaagctccttgctggtctcactgtaaaagctgggaccaagattgaacttcctgccaccgtaaccggaaaacctgaacctaaaataacttggacaaaggctgatatgattctgaagcaggacaaaagaattaccattgaaaatgtccctaagaaatccacagtgactattgttgatagtaagagaagtgacactggcacatatatcattgaggctgtgaatgtgtgtggccgggccactgctgtggtggaagtgaacgtcttagataaacccggaccaccagctgcctttgacatcacagatgtaaccaatgagtcatgtcttctaacatggaacccaccacgcgatgatggtggatctaagatcacaaactatgttgtggagagacgagcaactgatagtgaagtgtggcacaagctctcatccaccgtcaaggatacaaacttcaaggccaccaaattaatccccaataaagagtacatcttcagagttgctgcagaaaacatgtatggtgctggtgaaccagttcaggcctctccaataacagccaaatatcagtttgatccacctggtcctccaactcgcctagaaccttctgatatcactaaagacgcagtgactctcacatggtgtgagccagatgatgatggtggcagcccaatcacaggatactgggttgaaagactggatcctgatacagataaatgggttagatgcaataagatgccagtaaaggacacaacatacagagtgaaaggtctcactaataagaaaaaatacagattccgtgtgttggctgaaaatcttgctggacctggaaaaccaagcaaatcaactgaaccaatcttaataaaggatcccatagatcctccatggccccctggaaaaccaactgtaaaagatgtaggcaaaacatcagtaaggttgaattggacaaaaccagaacatgatggaggtgcaaagattgagtcttatgtcattgaaatgctgaagactggaacagatgagtgggtcagagtggcggaaggggttcccaccactcagcacttgctcccagggctcatggaaggacaggaatactcattccgagttagagctgtgaataaggctggggaaagtgaacccagtgaacccagtgaccctgtgctttgccgggagaagctatatcctccatcaccaccacgctggcttgaagttattaatatcacaaaaaatacagcagacctaaaatggacagttcctgagaaagatggagggtcccccatcaccaactacattgtggaaaagagagacgtcaggcgaaaaggctggcaaacagtggataccactgtcaaggacaccaagtgcacagtcaccccactgactgagggctctttatatgtgttccgagttgctgcagaaaatgctataggacaaagcgactacaccgaaattgaggactctgtgctggccaaagacacctttaccactcctggaccaccctacgccctggcagtggttgatgtgacaaaacgacatgttgacctaaagtgggagccacctaaaaatgatggtggaagaccaatacagagatatgtcattgagaagaaagaaaggttaggtacccgttgggtgaaagctggaaagactgcaggacctgactgtaacttcagagtaactgatgtcatcgaaggaacagaggtccagtttcaggttcgggctgaaaatgaagctggagttggccacccaagtgaacccacagaaatcctatccattgaagatccaacaagtcctccctcaccaccccttgacctacatgtgactgatgctgggagaaaacacattgccattgcttggaagcctccagagaaaaatggtggaagtcctatcataggataccatgttgaaatgtgtccagtaggcactgagaaatggatgagagttaattctcgcccaataaaggacttgaaattcaaggttgaagaaggtgttgttcctgacaaagaatatgtcctgagagtgagagcagtcaatgctattggtgtcagcgagccatctgaaatctctgaaaatgtggttgccaaagacccagactgcaagccaacaattgacctggagactcatgacattattgttattgaaggtgaaaagttaagcattcctgttcccttcagagctgtcccagttccaactgttagttggcataaagatggcaaagaagttaaagcaagtgatagattaacaatgaagaatgatcacatctctgcacaccttgaagttcccaagagtgtccgtgcagatgccggaatttataccattacactggagaataagctcggctcagcaacagcctcaatcaatgtcaaagtcataggcctacctggaccatgcaaagatattaaagcaagtgacattaccaagagttcttgtaagttaacttgggaacctccagaatttgatggtggaaccccaattcttcattatgtcctggagcgcagagaagctgggaggagaacatatataccagtcatgtctggtgagaacaaactgtcatggactgtgaaggatctcataccaaatggtgaatacttcttccgtgttaaagcagtcaacaaggttggtggaggagaatatattgaactgaaaaatccagtcattgctcaagatccaaagcaaccccctgatccacctgtagatgtagaggttcataatcctacagcggaggcaatgactattacatggaagccacctttgtatgatggagggagcaagataatgggctacatcatagagaagattgctaagggtgaagaaaggtggaagagatgcaatgaacacctggtaccaatcctgacctatacagcaaaaggacttgaagaggggaaagagtaccaattccgtgtgcgagcagagaacgccgcgggtattagtgaaccttctcgggctactcctccaaccaaagctgtagatcccattgatgcccccaaagtcattctgagaacaagcctagaagtgaaacgaggtgatgaaatagcacttgatgcaagtatttctggatcaccttacccaactattacatggataaaggatgaaaatgttattgtaccagaggaaattaagaagcgtgcagcacccttggttaggagaaggaagggtgaagttcaagaagaagaaccatttgtcctgcctctgacacagcgtttgagtattgacaacagcaaaaagggagaatctcagctacgcgtccgagattctctccgacctgaccatggtctgtatatgatcaaagttgaaaatgaccacggtattgcaaaagctccttgtactgtcagtgtgttagatacaccgggaccaccaatcaactttgtatttgaagatatcagaaagacctcagtcctttgtaaatgggaaccaccccttgatgatggtggcagtgaaatcataaactacactttggaaaagaaagacaagacaaaacccgactcagaatggattgttgtcacttcaacacttagacattgcaaatattcagtaacaaaactgattgaaggaaaagagtacctcttccgtgtaagagctgaaaacagatttgggccaggtccaccatgtgtttcaaagccacttgtggctaaagatccatttggaccacctgatgcaccagataagcccattgtggaagatgttaccagcaacagtatgctagtgaaatggaatgaaccaaaagataatggaagccccattttgggttactggcttgaaaaacgtgaagttaacagtacacattggtctcgtgtcaacaaaagccttctgaatgccttgaaagccaatgtagatggcttattagaaggactcacctatgtcttcagagtatgtgctgaaaatgcagctggacctggaaagttcagtccaccttcagatcccaaaacagcacatgatccaatctctcctcctgggccacctatcccaagagtcactgacacaagctctacaactattgaactagaatgggaacccccagctttcaatggtggtggggaaattgttggctattttgttgataagcagttggttggcacaaataaatggtcacgctgcacagagaagatgatcaaggtccgtcagtacaccgtcaaagaaatccgagagggtgctgattacaaacttcgggtgagtgctgtcaatgccgcaggggaaggaccgcctggagaaacacaacctgttactgtggctgaaccacaagagcctccagctgtggaactggatgtttctgtcaagggtggaatacaaataatggctgggaagactcttagaattccagctgtggtgactggtcgccctgtacctacaaaagtatggaccaaagaagaaggggagctggataaagaccgtgttgtaatagacaacgttggaaccaaatctgaactaattatcaaggatgcactgcgaaaagaccatggcagatatgtgattacagctacaaatagctgtggttccaaatttgcagcagccagggtagaagtttttgatgtccctggtccagttcttgacttaaaacctgttgtaacaaacagaaaaatgtgtctacttaactggtctgatccagaagatgatggaggaagtgaaataacaggctttatcattgaaagaaaagatgccaagatgcatacttggagacaaccaatagagactgagagatctaaatgtgacatcacaggtctgcttgagggacaagaatataagttccgtgttattgccaagaacaagtttggctgtggccctcctgttgaaataggaccaattcttgcagttgatccactaggtcctccaacatctccagagaggctcacatacactgaaagacaaaggtccactatcacacttgactggaaagagccccgcagtaatggtggcagtcccatccaaggatatatcattgaaaaacggcgtcatgacaaacctgactttgaaagagttaacaagcgactctgcccaaccacatcttttctggttgaaaatcttgatgaacaccaaatgtatgagttccgtgtcaaagctgtcaatgaaattggtgaaagtgaaccatccctacctcttaatgtagtcatacaagatgatgaagtgcctccaactattaagttgcgtctgagtgttcgaggagacactatcaaagttaaggcaggagagcctgtccacatccctgcagatgtgacaggccttccaatgcctaagattgaatggtccaaaaatgaaactgtaattgaaaaacccactgatgcacttcagataaccaaggaagaggtatcccgaagtgaggcaaaaactgagcttagcattcccaaagcggtccgggaggacaaaggcacttacacagttactgcttccaatcgccttggctcagtgttccgaaatgttcacgttgaagtatatgaccgcccatccccaccaagaaatcttgctgttactgacattaaagctgaatcttgctacttgacatgggatgcccctcttgataatggtggcagtgaaatcacccattatgttattgacaaacgtgatgcaagtaggaagaaagcagaatgggaggaagtcaccaacactgctgtagagaaaagatatgggatctggaaacttatccccaatggtcagtatgagttccgagtcagggcagtgaataaatatggaatcagtgatgagtgcaaatcagataaagtagtcattcaagatccttatcgccttcctggacctccaggaaaaccaaaagttttggcacgcaccaaaggatcaatgctagtgagctggactcctcctttggacaatggtggctctccaattactggctactggctggagaaaagagaagagggaagtccttattggtcacgtgttagccgagcaccaataaccaaagtgggattgaaaggcgtggaatttaatgttcctcgtttgcttgaaggcgttaaataccagttcagagccatggcaataaatgctgcaggaattggtcctcccagtgaaccatcagatccagaggttgcaggagatcccatatttccaccggggccaccttcttgcccagaagttaaagataaaacgaagtcaagcatctcactaggatggaaacctccagccaaagatggtggcagcccaatcaaaggatacattgtagaaatgcaagaagaaggtactactgactggaaaagagtaaatgaaccagacaaacttataactacctgtgaatgtgtggtgcctaatctgaaagagctcaggaagtacagattcagagtgaaagctgtcaatgaagctggtgaatctgaaccaagtgatacaactggggagatccctgccactgatattcaagaggaaccagaagttttcattgacattggagcacaggactgtctggtttgtaaagctggctcacagattaggattcctgctgtcatcaagggacgcccaacaccaaaatcatcttgggaatttgatggaaaggcaaagaaagcaatgaaggatggagttcatgacatacccgaagatgcacagctggagactgctgaaaactcctcagtaattattattccggagtgtaaacgatctcatacaggcaaatacagcatcacagccaagaataaagcaggacaaaagactgcaaattgcagagttaaagtcatggatgtaccaggcccacccaaagatctgaaagtcagtgatatcacaaggggtagttgcagactttcatggaagatgccagacgacgatggaggagacaggatcaaaggctatgttattgagaagaggactattgatggaaaagcctggaccaaagtcaatccagactgtggaagcaccacatttgtagtgcctgatctcctctctgaacagcaatatttcttccgtgtgcgagcagaaaaccgttttggtattggcccacctgtggaaaccattcagaggaccactgccagagatccgatatatcctcctgatcctcctattaaactcaagattggcctcatcacaaagaacacagtgcatctgtcatggaaacccccgaagaatgatgggggctcccctgttacccactatattgttgagtgccttgcatgggaccctactgggacaaagaaagaagcctggaggcagtgcaataagcgtgatgtggaagaactgcaatttactgttgaagacctagtagaaggtggggaatatgaattccgagtcaaagctgtcaatgctgcaggagtcagcaagccttcagccactgttggcccctgtgactgtcaaagaccagacatgccaccatcaattgatctaaaagaattcatggaggttgaagaaggaaccaatgttaacattgtggccaaaattaaaggtgtgccattcccgacactaacctggtttaaagctcctccaaagaagcctgataacaaagaacctgttctctatgacacccatgtcaacaaactggtggtagatgatacttgcactttagttattccgcagtctcgcaggagtgacactggcttatataccatcacagctgtaaataatctgggaacagcatcaaaggagatgagactgaatgtcctgggtcgtcctggccctccagtgggacccataaaatttgaatctgtttcagcagatcaaatgacactatcttggtttccacctaaagatgatggtgggtctaagattacaaactatgtaattgagaaaagagaagctaacaggaagacatgggtccatgtctccagtgaacctaaggagtgcacgtacacgattcccaaattgctagaaggccatgaatatgtattccgaatcatggcccagaataaatatggcattggagaacctcttgacagtgaacctgaaacagcaagaaacctcttctctgtccctggagcaccagataaaccaacagttagcagcgtgactcgtaactccatgactgtcaactgggaagagccagaatatgatggaggctctcctgtgacagggtactggctggaaatgaaagacaccacttcaaagagatggaagagagttaaccgagatcctatcaaagccatgactttgggtgtttcttataaagtgactggtcttattgaaggttccgactatcaattccgggtatatgcaatcaatgctgctggcgtgggtccagcaagtctgccatcagacccagcgactgctagagatccaattgcccctcctggtcctccatttcccaaagtgacagattggactaaatcatctgcagatctggagtggtctcccccactaaaagatggtggatccaaagtaactggatacatcgttgaatataaagaagaaggaaaagaagaatgggaaaagggtaaagataaagaagtgagaggaacaaagctcgttgtgacaggattaaaggaaggagcattctacaaatttagagttagtgcagtcaacattgctggcattggagaacctggagaggtcacagatgtcattgaaatgaaggacagacttgtttcacctgaccttcagctagatgccagtgtcagagatagaattgttgtccatgctggaggggtgatccgaatcattgcctatgtgtctggaaagcctcctccaaccgtcacctggaacatgaatgaaagaaccttacctcaagaagccaccattgagaccacagccattagctcatccatggtcatcaagaactgccagaggagccatcaaggcgtctattctcttcttgccaaaaatgaagccggagaaagaaagaagacaattattgttgatgtattagatgttccaggtcccgttggaacaccattcctagctcacaacctaaccaatgagtcctgcaaactgacatggttttctccagaagatgatggaggctctccaatcaccaattatgtcattgaaaagcgtgaatctgaccgcagagcatggaccccagtgacatatacagttacccgacaaaatgctactgtccagggtctcattcaaggaaaagcctactttttccgaattgcggctgaaaatagtattggcatgggtccatttgttgagacatcagaggcacttgttatcagagagccaataactgtaccagagcgtcctgaagacctggaagtcaaagaagttactaaaaatactgtaactttgacttggaatcctcctaagtatgatggtgggtcagaaattattaactatgtcctagaaagtcggctcattgggactgagaagttccacaaagttacaaatgacaacttgcttagcagaaaatacactgttaaaggcttaaaagaaggtgatacctatgagtaccgtgtcagtgctgtcaacattgttggacaaggcaaaccatcattttgcaccaaaccaattacttgcaaggatgagctggcacccccaacgcttcacctcgacttcagagataagctcacgattcgagttggtgaagcttttgccctcactggccgttactcaggcaaaccaaagcctaaggtttcctggttcaaagatgaagctgatgtgctggaagatgatcgcactcatataaagactacaccagcaacacttgctttagagaagatcaaggccaaacgttcagattccggcaaatactgtgtggttgtggagaacagtacaggctctaggaaaggtttctgtcaagttaatgttgttgaccatcctggaccaccagtaggaccagttagttttgatgaggtgaccaaagattacatggttatctcttggaagcctcctttagatgatggaggcagtaaaatcaccaattatattattgagaagaaggaagtgggtaaagacgtctggatgccagtgacatctgcaagtgctaaaacaacatgcaaagtttctaaactacttgaaggaaaagattatattttccggatacatgctgaaaatctgtatggaataagtgatcctctggtgtctgattcaatgaaagccaaagatcgtttcagggttcctgatgcacctgatcagccaattgttacagaagttaccaaagactctgcattagtaacctggaataagccacatgatggaggaaaacccatcacaaactacatcctggaaaagagagaaactatgtctaaacgatgggctagagttaccaaagatcctattcatccatacactaaatttagggttcctgatcttctagaaggatgtcagtatgaattccgggtttctgcagaaaatgaaattggtattggagatccaagcccaccatccaaaccagtctttgctaaagatccaattgctaaaccaagtccacctgttaatcctgaagcaatagatacaacatgcaattcagtcgatctaacttggcagccaccacgtcatgatggtgggagcaagattctgggttatattgttgagtaccagaaagttggagatgaagagtggagaagagccaatcacacccctgagtcatgtcctgaaactaaatataaagtcaccggtcttcgggacggtcaaacctataagtttagagtgttagcagtcaatgcagctggtgaatcagatccagctcatgttccggagccagtcctagtaaaagacaggcttgaaccccctgagttgattcttgatgccaacatggcaagagaacaacacattaaagttggtgatactctaagacttagtgccatcatcaaaggagtgccattcccaaaagtaacttggaaaaaagaagacagagatgctccaactaaagcaagaattgatgtgactccagttggtagcaagcttgaaattcgtaatgctgcccatgaagatggtggaatttattctttaacagtggagaatccagctggttcaaaaactgtctcagtaaaagtacttgtattagataaacctgggccacctagagatctggaagtcagtgaaattaggaaagattcatgttaccttacttggaaagaaccactagatgatggtggttctgttattaccaattatgtggttgagaggagagatgttgccagcgcccagtggtcacctctctcagctacatcaaagaaaaagagtcacttcgctaagcatctgaatgaaggcaaccagtacctcttccgagtagctgcggagaaccagtatggacgtggtccttttgttgaaacaccaaaaccaatcaaggctttggatcctctccatcccccagggccacccaaggacctgcaccatgtagatgttgacaagactgaagtctccctagtctggaataagccggatcgtgatggtggttctccaatcactggatatttggtagaatatcaagaagaaggcacccaggactggattaaatttaagactgtgacaaacttagagtgtgtggttactggactacaacaaggaaagacctatagattccgtgtaaaagctgaaaacattgtgggtcttggtctccctgacacaactatcccgatagaatgtcaagaaaaactagtgcctccatccgtggagctagatgtgaaattaattgaaggtcttgtggtaaaggctggaaccacagtcagattccctgctattataagaggtgtgcctgttcctactgcaaagtggacaaccgatgggagtgagattaaaaccgatgagcactacacagttgaaacagacaacttctcatcagtacttaccattaagaactgcttaaggagagacactggggaatatcaaatcacagtttccaatgcagccggtagcaaaacagtagccgtacatcttactgttcttgatgttcctgggccaccaacaggtcctattaatattctggatgttactcctgaacacatgactatctcatggcagccacctaaggatgatggaggaagccctgtgataaattatattgttgagaaacaagatacaaggaaagacacgtggggtgttgtctcttccggaagcagtaagacaaagctgaaaatcccacatctgcagaagggctgtgaatatgttttccgagttagagcagagaataagataggtgttggtcctccccttgactccacacctactgttgctaagcataaatttagtcctccgtctcctcctggtaaaccagtggttactgacattactgaaaatgcagcaacagtgtcttggaccctgccaaaatctgatggtggcagtccaataactggctactatatggaacgtcgagaagtaactggcaaatgggtgagggtcaacaaaacacctatcgctgacctgaagttcagagtgactggactctatgaaggaaatacatatgagtttagagtttttgctgaaaatcttgcaggactaagcaaaccatccccaagttctgatccaataaaagcttgccggcccatcaaaccacctggaccacctattaatcctaaactgaaagacaagagcagagaaacagctgatttggtgtggacaaagcctctcagtgatggtggtagccccattctaggatatgtagtggaatgtcagaaacctggcacggcacaatggaacaggattaataaagatgaactcattaggcaatgtgcctttagggtacctggactaattgaaggaaatgagtacagattccgtataaaggcagctaatattgtaggagagggtgagccaagagaactagcagaatctgtgattgcaaaagatatccttcatcctccagaagtagaacttgatgttacttgtcgtgatgttattaccgtgagagtaggccaaactatccgcattctagctcgagtcaaaggcagacctgaaccagacataacttggactaaggaaggcaaagtattggtccgagaaaagagggtggaccttattcaggatctacctcgtgttgagttacaaattaaagaagctgttagagctgatcatggcaagtatatcatctcagctaagaacagcagtggacatgcccaaggttcagccatcgttaacgtccttgacagacctgggccttgccagaatttgaaggttaccaatgtaaccaaagagaactgtacaatttcttgggaaaacccactagataatggtggctcagaaataacaaacttcatagtagaatatcgcaaaccaaaccagaaaggctggtcaattgttgcatcagatgtcactaaacgattaatcaaggccaaccttttagccaacaatgaatactatttccgagtttgtgcagagaataaagtaggtgttgggccaaccatcgaaacaaaaactcccattctggctattaaccctattgacagaccaggtgagcctgaaaaccttcacattgcagataaaggaaagacatttgtctacctaaagtggcggaggcctgactatgatggtggcagtccaaatctgtcatatcatgttgagagaaggcttaagggctccgatgactgggaaagagtgcataaaggaagcattaaagaaactcactacatggttgacagatgtgttgaaaaccagatttatgagttcagagtgcaaacaaagaatgaaggtggggaaagtgactgggtgaagacagaggaagttgttgtgaaagaagacttacaaaaaccagtacttgatctgaaattaagtggggtcctaactgtcaaagcaggggacaccattaggcttgaggcaggggttagaggcaaaccattcccagaagttgcatggaccaaggacaaagacgctacagacttaacaagatcaccaagggtcaagattgatacccgtgctgattcatctaaattttctcttactaaagcaaagcgaagtgatgggggtaaatatgtagttacggcaactaacacggctggcagttttgtggcctatgccactgtcaatgttttagataagcctggtcctgtgagaaatctgaaaattgttgatgtgtccagtgataggtgtactgtttgctgggatccaccagaagatgatggtggctgtgaaatccaaaattatattctagaaaaatgtgagacaaagcgaatggtttggtctacctattctgctactgtcttgacacctggtactacagtaacacgtctcatagaaggaaatgaatatattttcagagtccgtgcagaaaataaaataggcacagggcctccaacagaaagtaaaccagtcatagccaaaaccaagtatgataaacctggtcgccctgatcccccagaagtcactaaagtaagcaaagaagagatgactgtggtttggaatccacctgaatatgatggtggaaagtctataactggatactttttggagaaaaaggaaaagcattcaacacgatgggtccctgtcaacaagagtgcaatccctgagagacgtatgaaagtacagaatctcctcccagaccatgaatatcagttccgtgtcaaggcagaaaatgaaattggaattggagaaccaagcttgccttcaagaccggtggtggcaaaagaccccatagagccacctggtccaccaaccaatttcagagtggttgatacaaccaaacattccataactcttgggtggggaaaaccagtctatgatggtggtgcaccgatcattggatatgttgtggaaatgagaccaaaaatagcagatgcgtctcctgatgaaggctggaaacggtgtaatgctgcagcacagcttgtacgcaaggaattcactgttaccagcttggatgaaaaccaggaatatgagttcagggtgtgtgcccaaaaccaagttggtattgggcgccctgcagagctaaaggaagctatcaaacctaaagaaatactagaacctccggagattgatttggatgccagcatgaggaaactggtcatagtgagagcaggatgccctattcgtctctttgctatagtgagaggacgaccagcccctaaagtcacttggcgaaaagttggcattgataatgtggtcagaaaaggacaagttgatctggttgacactatggccttccttgtcatccccaattctacccgtgatgactcaggaaaatattccttaacacttgtgaacccagcaggagaaaaggctgtattcgtaaatgtcagagtattagacactcctgggcctgtgtctgatttaaaagtttcagatgtcactaaaacatcatgccatgtgtcctgggcccctcctgaaaacgacggtgggagccaagtgacacattatatcgtggagaaacgtgaggcagacagaaagacatggtcgaccgttaccccagaagttaagaaaacaagcttccatgtaaccaatcttgtccctgggaatgagtattacttcagagtaactgctgtcaacgaatatggccctggcgtcccaacagatgtcccaaaaccagtgcttgcatcagatcctctaagtgagccggatcccccaaggaaattagaagcgactgaaatgaccaagaacagtgccaccttagcctggttacctcccctacgtgatggaggtgctaaaatcgatggctacatcattagttacagagaagaagagcagcctgcagatcgctggacagagtactcagtggtaaaagatctgagccttgttgtcactggcctaaaggaaggaaagaaatacaaatttagagtagcggccagaaatgctgttggagtcagtttgccaagagaagctgaaggagtgtatgaagccaaagagcaactgttgccaccaaagatccttatgccagagcaaataactatcaaagctgggaaaaaactccgaattgaagcccatgtgtatggaaagcctcatcccacctgtaaatggaaaaaaggagaagatgaagttgtcacatccagccacctggcagtgcataaagcagacagctcttcaattctgatcataaaagatgtgactaggaaagacagtggttactacagcctcacagcagagaacagttctgggacagacactcagaaaatcaaagttgtagtcatggatgcccccggcccccctcagcctccatttgacatttctgatatagacgctgatgcttgctccctgtcatggcacatccctctggaggacggaggcagtaacatcaccaattatatagtggagaagtgtgatgtaagccgaggtgactgggtcacggctctagcttcagtcacaaaaacttcctgcagggttggaaagctgatcccaggccaagagtacatcttccgggtccgtgctgaaaaccgatttggcatttcagagcctctcacatctccaaagatggttgcgcagttcccatttggtgttcctagtgaaccaaagaatgcacgagtcaccaaagtcaacaaggactgtatttttgttgcttgggacagaccagatagtgatggagggagccccattattggttatctgattgaacgcaaggaaagaaacagtttgctgtgggtgaaagccaatgatactcttgtccggtcaactgaatatccttgtgctggccttgtagaaggtcttgagtattcattcagaatctatgccctaaacaaagctggatccagcccacccagcaaacccacagaatatgtaactgcaagaatgccagttgatcctcctgggaaacctgaggttattgatgtcaccaagagtactgtatctctgatctgggctcgtccaaagcatgatggaggcagtaaaattattggctatttcgtagaagcttgcaaacttcctggtgataaatgggtacggtgcaatactgcacctcaccagattccccaggaagagtacacagctactggcctagaagagaaagctcagtatcaatttagagctattgccaggaccgcggtaaacattagcccaccttctgaaccttctgatccagtgactatcctcgcagaaaatgtccctcccaggatagacctgagtgtggctatgaaatctttgcttactgtgaaagctggaactaatgtctgcttggatgctactgtttttggtaaaccgatgccaacagtttcttggaaaaaagatggcacactgctaaaaccagcagaaggcataaagatggccatgcagcggaatctgtgcaccttggagctattcagcgtgaaccggaaggactcaggagactataccattactgctgaaaattcaagtggttctaaatcagccaccattaagcttaaagtgttagataaaccgggtcctccagcatctgttaaaatcaacaaaatgtattcagatcgtgctatgctttcttgggaaccgcctcttgaagatggaggctcagaaatcaccaactatattgttgacaaacgtgaaacaagcaggcccaactgggctcaagtctctgcaactgtgcctatcaccagctgcagcgtggagaaacttatagagggccatgagtatcagttccgtatttgtgctgaaaataaatatggagtaggcgatccagtcttcactgaaccagcaattgccaaaaacccatatgacccaccaggacgctgtgatcctcctgttattagcaacataaccaaagatcacatgacagtcagctggaagccaccagcagatgatgggggctcacccatcactggctatttgcttgaaaagcgggaaacccaggctgttaactggactaaggtcaacagaaaacctattatagaaagaacattaaaagcaacaggtcttcaagaaggtaccgaatatgagttccgtgttacagctataaataaagctggaccaggcaaacccagtgacgcatccaaggccgcttatgctcgggaccctcagtatcctcctgcgccaccggctttccctaaagtatatgatacaactcgcagctctgtgagtctatcttggggcaagccagcctatgacggcggcagccctatcattggttatctcgttgaagtaaaacgggctgactccgataactgggtgaggtgcaacttaccacagaatctacagaaaacccgctttgaggttactggcctgatggaagacacacaatatcaattccgtgtgtatgccgttaataagattggatacagtgaccccagtgatgtgccagataaacactatcccaaggacatcttaattccacctgagggagaacatgatgcggacttaaggaagacactcatattacgtgctggagttactatgagactatatgtaccagtaaaaggacgcccacctccaaagattacttggtctaaaccaaatgtcaatctaagagacaggattggactggacataaagtcaactgactttgacactttcttgcgctgtgaaaatgtgaacaaatatgatgcaggaaaatatatcttaaccctggagaacagctgtggtaaaaaggaatataccattgttgtgaaagtgcttgatactcctgggccacctatcaatgtgactgttaaggaaatatccaaagactctgcttatgttacctgggagcctcccattattgatggcggaagccccatcataaactatgtggtacaaaaacgtgatgcagagaggaaatcctggtctacagtgacaactgagtgctccaaaacaagcttcagagtacctaatttggaggagggaaaatcctacttcttccgagtgtttgctgaaaatgagtatggcattggtgatcccggtgaaactcgtgatgctgtcaaagcttcccaaactcctggaccagttgtggacctgaaagtgaggtctgtatctaagtcatcctgtagcattggctggaaaaagcctcacagtgatggtggaagtcggattattggatatgtagttgatttcctgactgaagaaaataagtggcaacgagttatgaaatccttaagcctacagtactctgcaaaagatttgactgaagggaaggaatataccttcagagtgagtgctgagaatgaaaatggagaaggaaccccaagcgaaatcactgttgtggcaagggatgatgttgtggctcctgatcttgacttaaagggtctacctgatttgtgctacttggctaaagaaaacagcaacttccggcttaagatccccataaaaggcaagccagctccatcagtctcctggaagaaaggggaagatcctctagcaactgacactagagtcagtgttgagtcatctgcggttaacacaactcttatagtgtacgattgccaaaaatctgatgctggaaaatacacaatcacacttaagaatgttgctggcaccaaggaaggaactatctccataaaggttgttggcaagcctggcatccccactggaccaatcaaatttgatgaagtcacagcagaagccatgaccttaaagtgggctcctccaaaggatgatggaggttctgaaatcaccaactatatcctagagaagagggattctgtgaacaacaagtgggtgacgtgcgcctcagctgtccagaaaaccacctttagagtaaccagacttcatgagggcatggaatataccttcagggtcagtgccgaaaataaatatggtgtaggggaaggcctgaaatcggagccaattgttgcgagacatccatttgatgtgcctgatgctcccccacctcccaatattgtggatgtcagacacgattcagtatctctaacttggactgaccccaagaaaactggtggttctccaattacagggtatcatctcgagttcaaggaaagaaacagccttttgtggaagagagctaacaagactccgataaggatgagagactttaaagtgacaggattaactgaaggtcttgaatatgaattccgagttatggcaatcaatttagcaggtgtgggcaagccaagcctaccatcagagcctgttgtggcactggacccaattgatcctcctggaaaacctgaggttattaacataacaaggaattcagtgactctcatttggactgaacctaaatatgacggtggtcataagttaactggatatatagtggagaagcgagatctaccttcgaagtcttggatgaaagccaaccatgttaatgtcccagaatgtgcctttactgtaactgaccttgttgagggtggaaaatatgaattcagaattagagcaaagaatacagcaggtgctatcagtgctccatcagaaagtacagaaaccattatttgcaaggatgaatacgaggcaccaacaattgtccttgatcccacaataaaagatgggctaacaattaaagcaggggataccattgttttgaatgccattagcattcttggcaaaccccttccaaaatcaagttggtccaaggcaggaaaagacattagaccatcagatatcactcagataacttcaaccccaacatcttccatgcttactatcaagtatgccactagaaaagatgcgggtgaatataccatcactgctaccaatccttttggcacgaaggtggaacatgtgaaggtaacagtccttgatgtacctggtcccccaggtcctgttgaaatcagtaatgtttctgctgaaaaagcaacacttacatggacacctcccttggaagatggcggctcaccaattaagtcctatatacttgaaaagagagaaaccagccgacttttgtggacagtggtttctgaagatattcagtcttgcaggcatgtggcaaccaaacttatccaaggaaatgagtacatcttccgggtctcagctgtaaaccactatggcaaaggagaacctgtacagtctgaacctgtcaaaatggtagacagatttggtccccctggccctcctgaaaaaccagaggtatcaaatgtcactaagaacactgccactgtcagctggaaaaggccagtggatgatggtggcagcgaaattacaggatatcatgtagaaaggagagaaaagaaaagcctgcgatgggtgagagcaataaaaacaccagtttccgatctcaggtgcaaagtaacaggactgcaagaaggaagcacctacgaattccgtgtcagtgcagaaaacagagcaggaattggtccacccagtgaggcttcagattctgttctgatgaaagatgcagcatatcctccaggaccaccttcaaatccgcatgtcactgatactaccaagaaatctgcttctttggcatggggcaagcctcattatgatggtggacttgaaatcactggctatgtcgtggagcatcaaaaagtaggagacgaggcctggataaaagataccacaggaaccgccctcagaatcactcagttcgttgttcctgatcttcagactaaagaaaaatacaacttcagaatcagtgccatcaacgatgcaggtgttggggagccagcggtgattccagatgttgaaatcgtagaacgggagatggctcctgattttgaactagatgccgagcttcgaagaacacttgttgttagagcaggactcagtattaggatatttgtgccaattaaaggtcgtcctgctcctgaagtgacatggaccaaagataacatcaacctgaaaaaccgagccaacattgaaaatacggaatcatttactcttctgattatcccagaatgtaacagatatgataccggtaaatttgtcatgaccattgaaaacccggctgggaagaaaagtggctttgtgaacgtcagagtcttggacacgccaggcccagtcctcaacctgcggcctacagacatcacaaaggacagtgtcaccctgcactgggacctccctctgatagatggaggctcacgtataacaaactacattgtagagaaacgtgaagcaacacggaaatcttattccacagccaccactaagtgccataaatgcacatataaagttaccggcttgtctgaagggtgtgaatatttcttcagagtgatggcagagaatgaatatggaattggtgagccaacagaaactacagagcccgtaaaagcctctgaagcaccatctccaccagacagccttaacatcatggacataactaagagcaccgtcagcctggcatggcctaagcccaaacacgatggtggcagcaagatcactggctatgtgattgaagcccaaagaaaaggctctgaccagtggacccacatcacaaccgtgaaagggttagaatgtgttgtgaggaatctaactgaaggagaggaatataccttccaagtgatggcagtgaacagcgcggggagaagtgcccctagagaaagcagacccgtcattgtcaaggagcagacaatgcttccagagctggatctccgtggcatctatcagaaactggtcattgccaaagctggtgacaacatcaaagttgaaattccagtgctcggtcgaccgaagcccacagtgacatggaaaaaaggagaccaaattcttaaacagacacagagagttaattttgaaaccacagcgacttcaaccattttaaatatcaatgagtgtgtcagaagtgatagtgggccctatccattaacagcaaggaacattgtaggagaggttggtgatgtcatcaccattcaagtccatgatatcccagggccacctactggaccaatcaaatttgatgaagtttcatctgattttgtaaccttctcttgggacccacctgagaacgatggtggtgtaccaataagcaactatgtagtggaaatgcggcagactgacagtactacctgggttgagttagcaaccaccgttatacgtactacctataaagccacccgccttactactggattagagtatcagttccgtgtaaaagctcagaatagatatggagttggaccaggcatcacatcagcatggatagttgccaactatccatttaaggttcctggacctcctggtacccctcaggtaactgcagttaccaaggattcaatgacaattagctggcatgagccactttctgatggtggaagccccattttaggatatcatgttgaaagaaaagaacgaaatggtattctctggcagactgtgagcaaagctttagtaccaggcaacattttcaaatcaagtggacttacagatggtattgcttatgagttccgggtgattgcagaaaacatggcaggcaaaagtaagccaagcaagccatcagaacctatgttggctctggatcccattgacccacctggaaaaccagtacctctaaatattacaagacacacagtaacacttaaatgggctaagcctgaatatactgggggctttaaaattaccagttatatcgttgaaaagagagaccttcctaatggacggtggctgaaggccaacttcagcaacattttggagaatgaatttacagtcagtggcctaacagaagatgctgcatatgaattccgtgtgatcgccaaaaatgctgcaggtgccatcagtccaccatctgagccatctgatgctatcacttgcagggatgatgttgaggcaccaaagataaaggtggatgttaaatttaaggacacggttatattaaaagcaggtgaagcattcagactggaagctgatgtttcaggccgcccacctccaacaatggaatggagcaaagatggaaaagagctggaaggcacagcaaagttagaaataaaaattgcagatttctctactaatctggtaaacaaagattcaacaagaagggatagtggtgcctatacccttacagcgactaatcctggtggctttgctaaacacattttcaatgtcaaagttcttgacagaccaggcccacctgaaggacctttggctgtaactgaagtgacatcagaaaagtgtgtactatcatggttccctccactggatgatggaggtgccaaaattgatcattacatagtacagaaacgtgaaaccagcagattggcatggacaaatgtagcctcagaagtccaagtaacaaagctaaaggtcactaaactcttgaaaggcaatgaatacatattccgtgtcatggctgtaaataaatatggagtgggagagccactggaatcagagcctgtgcttgcagtgaatccttatggaccccctgatccgcccaaaaaccctgaagtgacaactattactaaagattcgatggttgtctgctggggacatcctgattctgatggtggaagtgaaatcatcaattatattgtggaacggcgtgataaagctggccaacgctggattaaatgcaacaaaaaaactcttactgatttaagatataaagtgtctggactgacagaaggacatgaatatgagttcaggattatggctgaaaatgctgctggaattagtgcaccaagtcctaccagtccattttacaaggcttgtgacactgtgtttaaacctggaccaccaggtaacccacgtgttctggatacaagcagatcatccatttcaatcgcttggaataaacctatctatgatggtggttcagaaatcactgggtatatggttgagattgccctgccagaggaagatgaatggcagattgtcactccaccagcaggactcaaggcaacttcgtatactatcactggcctcacagagaatcaggaatataagatccgcatctatgccatgaattccgaaggacttggggaacctgcccttgttcctggaactccaaaggctgaagacagaatgctgcctccagaaattgaactggatgctgacctgcgcaaagttgttactataagggcctgctgcaccctgagactttttgttcccatcaaaggaaggcctgaccctgaggtgaagtgggcccgggaccatggagaatctttagataaagctagcatcgaatccgcaagctcttacaccctgcttattgttggaaatgtaaacagatttgacagtggcaaatatatactaactgtagaaaatagttcaggcagcaagtctgcatttgtcaatgttagagttctcgatacaccaggccccccacaggatctgaaggtaaaagaggtcactaagacatctgtcacactcacatgggacccacctctccttgatggaggttcaaaaatcaagaactatattgttgaaaagcgggaatcaacaagaaaagcatattcaactgttgcaacaaactgccacaagacttcctggaaggtagaccagcttcaagaaggctgtagctactatttcagggttctcgcagaaaatgaatatggcattgggctgcctgctgaaaccgcagaatctgtgaaagcatcagaacgacctcttcctccaggaaaaataactttgatggatgtcacaagaaatagtgtgtcactctcttgggagaaaccagagcatgatggaggcagccgaattctaggctacattgtggagatgcagaccaaaggcagtgacaaatgggccacgtgtgccacagtcaaggtcactgaagccactatcactggattaattcagggtgaagaatactctttccgtgtttcagctcagaatgaaaagggcatcagtgatcctagacaactgagtgtgccagtgatcgccaaagatcttgtcattccaccagccttcaaactcctgttcaatactttcactgtactggcaggtgaagacctaaaagttgatgttccattcattggccgccctaccccagctgtaacctggcataaagataatgtaccactgaagcagacaactagagtaaatgcagagagcacagaaaataattcactactgacaataaaggacgcctgccgagaagatgttggccattatgtggttaaactgactaactcagctggtgaagctattgaaacccttaatgttatcgttcttgacaaaccagggcctccaactggaccagttaaaatggatgaagtgacagctgatagtattactctttcctggggcccacccaagtatgatggcggaagttctatcaataattacattgttgagaaacgggacacttccacaaccacctggcaaattgtatcagctacagttgcaaggacaacaataaaggcttgcagactgaagactggatgtgaatatcagtttagaattgcagctgaaaacagatatgggaagagtacctacctcaattcagagcctactgtagcccaatatccattcaaagttcctggtcctcctggcactccagttgtcacactgtcctccagggacagcatggaagtacaatggaatgagccaatcagtgatggaggaagtagagtcattggctatcatctagaacgcaaggaaagaaatagcatcctctgggttaagttgaataaaacacctattcctcaaaccaagtttaagacaactggccttgaagaaggtgttgaatatgaatttagagtctctgcagagaacatcgtgggcattggcaagccgagtaaagtatcagaatgttatgtggctcgtgacccatgtgatccaccaggacggccagaggcaatcattgtcacaaggaattctgtgactcttcagtggaagaaacccacctatgacggtggaagcaagatcactggttatattgttgagaagaaagaattacctgagggccgttggatgaaagccagttttacaaatattattgacactcattttgaagtaactggcctagttgaagatcacagatatgagttccgggttatagcccgaaatgccgcaggagtgtttagtgagccttcagaaagcacaggagcaataacagctagagatgaggtagatccaccacgaataagtatggatccaaaatacaaagacacaatcgtggttcatgctggtgaatcattcaaggttgatgcagatatttatggcaaaccaataccaaccattcagtggataaaaggtgatcaggagctttcaaacacagctcgattagaaataaagagcaccgactttgccaccagtctcagtgtaaaagatgcagtacgtgtcgacagtggaaattacatactgaaggccaaaaatgttgcaggagaaagatcagttactgtgaatgtcaaggttcttgacagaccagggccacctgaaggacctgttgttatctcaggagttacagcagaaaaatgcacactagcttggaaacccccacttcaggatggtgggagtgacatcataaattatattgtggaaaggagagaaaccagccgcttagtttggactgtggttgatgccaatgtgcagactctcagctgcaaggttactaagcttcttgaaggcaatgaatatactttccgtataatggcagtaaacaaatatggtgttggtgaacctcttgaatctgagccagtagttgccaagaatccatttgtagtaccagatgcaccaaaagctccagaagtcacaacagtgaccaaggactcaatgattgttgtatgggaaagaccagcatctgatggtggtagtgaaattcttggatatgttcttgagaaacgggataaagaaggcattagatggacaagatgccataagcgtctgattggagagttgcgcctgagagtaactggactcatagaaaatcacgattatgagttcagagtttctgctgagaatgctgctggacttagtgaaccaagccctccttctgcttaccaaaaggcttgtgatcctatttataaaccaggacccccaaacaaccccaaagtcatagacataaccagatcttcagtattcctttcttggagcaaaccaatatatgatggtggctgtgaaattcaaggatacattgttgaaaaatgtgatgtgaatgttggtgaatggacaatgtgcactccaccaacaggaattaataaaacaaacatagaagtagagaagctgttggaaaagcatgaatacaacttccgtatctgtgctattaataaagctggagttggagaacatgctgacgtccctggacctattatagttgaagaaaaattagaagcaccagacattgatcttgacctagaactaaggaaaatcataaatataagggcaggtggctccttaaggttatttgttcctataaaaggtcgtcctacaccagaagttaaatggggaaaggtggatggtgaaatccgagatgcagctataattgatgtcactagcagtttcacctctcttgttcttgacaatgtcaaccgatatgatagtggaaaatatacgcttacattagaaaacagcagtggaacaaagtctgcctttgttactgtgagagttctggacacgccaagtccacctgttaacctgaaagtcacagaaatcaccaaagactcagtatcaattacatgggaacctcctttgttggatgggggatccaaaataaaaaattacattgttgagaaacgtgaagccacaagaaaatcatatgctgctgttgtaactaactgccataagaattcttggaaaatcgatcagctccaagaaggttgcagttattactttagagtcacagctgagaatgagtatggtattggccttcctgcccagactgctgatccaattaaggttgcagaagtgccacaacctcctggaaaaataactgtggatgatgtcaccagaaacagtgtctctctgagttggacaaaacctgaacatgatggtggcagtaaaatcattcagtatattgtggaaatgcaagctaaacacagtgagaaatggtcagagtgtgctcgagtaaagtctcttcaggcagtaattaccaacctaactcaaggggaagaatatctttttagagttgttgctgtaaatgaaaaggggagaagtgatcctcggtcccttgcagttccaatagttgccaaagatctggtaattgagccagatgtaaaacctgcattcagtagttacagtgtacaggttggccaagatttgaaaatggaagtgccaatttctggacgtcctaagccaaccattacctggactaaagatggtctcccactgaagcagaccacaagaatcaatgttaccgattcactggatctcaccacactcagtattaaagaaactcataaggatgatggtggacaatatggaatcacagttgccaatgttgttggtcagaagacagcatccatcgaaattgtaactctagataaacctgatcctccaaaaggacctgttaaatttgatgacgtcagtgctgaaagtattacattatcttggaaccctccattatatacagggggctgccaaatcaccaactacattgttcagaaaagagatacaaccaccacagtatgggatgttgtttctgctactgttgctagaactacactcaaagtgaccaaactgaaaactggtacagaataccaatttagaatatttgccgaaaacagatatggacaaagctttgccttagagtctgatccaattgtagctcaatatccctacaaagaaccaggccctccaggtacaccatttgccacagccatttccaaagactccatggtcatacagtggcatgaaccagtcaacaatggtggaagccccgtcataggttaccacctggagagaaaagaaagaaacagtattttgtggacaaaggtcaacaaaactattattcatgacacccaattcaaagcacagaatcttgaagaaggcattgaatatgaattcagagtgtatgctgaaaatattgttggtgtaggcaaagcaagcaagaattctgaatgctatgtagccagagatccctgtgacccaccaggaaccccagaaccaataatggttaaaagaaatgaaatcactttacagtggaccaaacctgtgtatgatggtggaagtatgattacaggctacattgtagagaaacgtgatttgcctgatggtcgttggatgaaagctagctttacaaatgtcattgaaactcaatttactgtgtcaggtcttactgaagatcaaagatatgaattcagagtcattgcaaagaatgcagctggtgcaataagtaaaccctctgacagtactggaccaataactgccaaggatgaggttgaactcccaagaatttcaatggatccaaaattcagagacacaattgtggtaaatgctggagaaacattcagacttgaggctgatgtccatggaaagcccctacctaccattgagtggttaagaggagataaggaaattgaagaatctgctagatgtgaaataaagaacacagatttcaaggctttacttattgtaaaagatgcaattagaattgatggtgggcagtatattttaagagcttccaatgttgcaggttctaagtcattcccagtaaatgtaaaagtattagatagaccaggacctccagaagggccagtccaggttactggagtcacttctgaaaaatgctctttaacatggtctccaccacttcaagatggtggcagtgacatttctcactatgttgttgaaaagcgagaaaccagtcgacttgcctggactgttgttgcttcagaagttgtgaccaattctctgaaagttaccaaactcttagaaggtaatgaatatgttttccgtataatggctgtcaacaaatatggtgttggagagcctttggaatctgcaccagtactaatgaaaaatccatttgtgcttcctggaccaccaaaaagcttggaagtcacaaatattgccaaagactccatgaccgtctgttggaaccgtccagatagtgatggtggaagtgagattattggttacattgtagagaaaagagacagaagtggcattcgatggataaaatgtaataaacgccgcattacagatttgcgtctaagagtgacaggattaacagaagatcatgagtatgaattcagggtctctgcagaaaatgctgctggagttggggaaccaagtccagctacagtttattataaagcctgtgatcctgtgttcaaacctggcccacctaccaatgcacacattgtagacaccactaaaaattcaatcacacttgcctggggtaaacccatctatgatggcggcagtgagatcttgggatatgtagtagaaatctgtaaagcagatgaagaagaatggcaaatagttactccacagactggcctgagagtcactcgatttgaaatttcaaaactcactgaacaccaagagtataaaatacgagtctgtgccctcaacaaagttggtttaggtgaggctacatcagttcctggtactgtgaaaccagaagataaacttgaagcacctgaacttgaccttgactccgaattaagaaaaggaattgttgtaagagctggtggatctgccagaattcacattccattcaaaggtcgtccaatgcctgagatcacttggtctcgagaggaaggtgaattcacagataaggtccaaattgaaaagggagtaaactatacccaactatcaatagataactgtgatagaaatgatgctggaaaatacattcttaagttggaaaacagcagtggatcaaagtctgcttttgtaactgtgaaagttcttgacactccaggaccaccacagaatttggcagtcaaagaagtgagaaaagattctgccttcctggtatgggagccacccatcattgatggaggggcaaaggtcaagaactatgtgattgacaaacgtgagtcaaccagaaaagcgtatgctaatgtgagtagtaaatgcagcaaaacaagttttaaagtggaaaaccttacagaaggagccatttattacttcagagtcatggctgaaaatgaatttggagttggtgttccagtggaaactgttgatgccgtgaaagctgctgaacctccttccccaccaggaaaggttacactcactgatgtgtcccagaccagtgcatcacttatgtgggagaaacctgaacatgatggcggtagcagagtcctggggtacgttgttgaaatgcagcccaaaggaactgaaaaatggagcattgtggctgaatccaaagtctgtaatgcagttgttactggtttgagttctggacaagaatatcagttccgtgtcaaggcttataatgagaaaggaaaaagcgatccaagagtgttgggtgttcctgtcatagccaaggacttgactatacagcctagtttaaagttaccatttaacacatatagtatccaagctggagaagatcttaaaatagaaattccagttataggccgaccaagacctaacatttcttgggtcaaagatggtgagcctcttaaacagacaacaagagtaaacgttgaagaaacagctacctcaactgttttgcacattaaagaaggtaacaaagatgactttggaaaatacaccgtaacggcaacaaatagtgcaggcacagcaacagaaaatctcagtgttatcgttttagaaaagcctggacctccagttggcccagttcggtttgatgaagttagtgcagactttgtagtcatatcttgggaacctccagcctatactggtggctgccaaataagcaactacattgtagagaagcgagatacaaccaccaccacttggcacatggtatcagcaacagttgcaagaacaacaattaaaataaccaaactgaaaacaggcacggagtaccagtttagaatttttgctgaaaacaggtatggaaaaagtgccccactggattctaaggcagttattgtacaatatccatttaaagaacctggaccacctggaactccttttgtgacatcaatctcaaaagatcagatgcttgtgcaatggcatgagccagtgaatgatggaggcaccaaaattattggctaccatcttgaacagaaagaaaagaacagtattttatgggtcaagttaaataagacccccattcaggacaccaaattcaaaacaactgggcttgatgagggccttgagtatgagttcaaagtttctgctgaaaatattgttggcattggcaagcctagcaaagtgtcagaatgctttgttgctcgtgatccatgtgacccacctggtcgccctgaagccattgttattacaagaaacaatgtcacactgaaatggaagaaacctgcctatgatggtggtagcaaaataacaggttatattgtagaaaagaaagatctacctgatggccgctggatgaaagccagctttaccaacgtattagaaactgaatttacagtgagtggacttgtagaagaccaaagatatgaatttagagtaattgcaagaaatgcagctggaaactttagtgaaccatctgatagtagtggtgccattactgcaagagatgaaattgatgcaccaaatgcctctctggatccaaaatataaagatgtcatcgttgttcatgcaggagagacttttgttcttgaagccgacatccgtggcaaacctatacctgatgttgtttggtcaaaagatggaaaagaacttgaagaaacagctgctagaatggaaattaaatctactattcagaaaacaactcttgttgtcaaagactgtatacggactgatggaggacaatatattctgaaactcagcaatgttggtggtacaaagtctatacccatcactgtaaaggtacttgacaggccagggtctcctgaagggcctctgaaagttactggagttactgcggaaaaatgttacctggcatggaacccacctttgcaagatggtggtgctaatatttcacattacatcattgaaaagagggagacaagccgactctcttggacccaggtttcaactgaggtacaggcccttaactacaaagttactaaacttcttcctggtaatgagtacattttccgtgtcatggctgtgaataaatatggaattggagagcccttggaatctgggcctgttacggcctgtaatccttataagccaccaggtcctccctcaacacctgaagtctcagcaatcaccaaagattctatggtagtaacatgggcacgcccagtagacgacggaggtaccgaaattgagggctacattcttgaaaaacgagataaggaaggcgttagatggaccaagtgcaacaagaaaacattaacggatctgcggctcagggtaactggtcttaccgaaggccattcctatgaattcagagttgctgctgaaaatgcagctggtgtgggagaacctagtgagccatctgttttctaccgtgcgtgtgatgccttgtatccaccaggtcccccaagcaatccaaaagtgacggacacttccagatcttctgtctccctggcatggagtaagccaatttatgatggtggcgcacctgttaaaggctatgttgtagaggtcaaagaagctgctgcggatgaatggacaacctgcactccaccaacaggattacaaggaaagcagttcacagtgaccaagcttaaagaaaacactgaatataacttccgtatttgtgccatcaattctgaaggtgtaggtgaacctgcaactctacctggctcagtggttgctcaggagaggatagagccaccagaaatagaactcgatgctgatctcagaaaggtggtcgttctgcgtgcaagtgctactttacgcttatttgtcactatcaaaggtcgaccagaacccgaagttaaatgggaaaaggcagaaggcattctcactgacagggctcagatagaggtgaccagctcatttacaatgttggtgattgataatgttaccagatttgacagtggtcggtataatctgacattagaaaataatagtggctccaaaacagcttttgttaacgtcagagttcttgactcaccaagtgcccctgtgaatttgaccataagagaagtgaagaaagactcagtgacgttgtcctgggaaccaccacttattgatggtggagctaagattacaaactacattgtcgaaaaacgagaaactacaagaaaagcctatgctaccattacaaataattgcactaaaactactttcagaattgaaaatctacaagaaggatgttcttactacttccgagtcttggcttccaatgaatatgggattggtttgccagctgaaacaacagaacccgttaaagtgtctgaaccacccctcccacctggaagagtaactcttgttgatgtgacccgtaatacagctacaattaagtgggagaaaccagaaagtgatggtggcagcaaaattactggttatgtggttgaaatgcagactaaagggagtgaaaagtggagcacctgcacacaagttaagactctagaagcaactatatctggcttaactgcaggagaagagtatgtcttcagggtagctgcagttaacgaaaagggaagaagtgatccaagacaacttggagtgccagtaattgcaagggatattgaaataaagccttcagttgagcttcctttccatactttcaatgtaaaggctagagaacaacttaagattgatgtgccattcaaaggaagacctcaagctactgtgaactggagaaaagatggtcagactcttaaagagacaactagagtcaatgtttcttcttcaaagactgtaacatcactatctattaaggaagcttcaaaggaagatgttggaacttatgaattatgtgtttcaaacagtgctggatccataacagttcctattactataattgtccttgacagaccaggacctccaggtcctatacgtattgatgaggttagttgtgacagcataaccatttcttggaatcctccagaatatgatggtggctgccaaattagcaattacattgttgaaaagaaagaaaccacctctacaacatggcacatagtttcacaagcagttgcaagaacatccattaaaatagttcgcctgacaacaggaagtgagtatcagttccgtgtttgtgcagaaaaccgctatggaaagagctcctacagtgaatcttcagctgttgttgcagagtatccattcagtcccccaggtcctcctggtactcctaaagttgtgcatgccacaaaatctaccatgcttgtaacctggcaagtgccagttaatgatggaggaagtcgagtaattggctatcatcttgagtataaagaaagaagcagcattctttggtcaaaagcaaataaaatcctcattgctgatactcaagtgaaagtctccggccttgatgaaggactgatgtatgagtatcgtgtatatgctgaaaatattgctggaattggtaaatgcagtaaatcttgtgaaccagtccctgcaagagatccttgtgaccctcctggacaacctgaagtcacaaatatcacaagaaaatcagtgtcacttaaatggtctaaaccacattatgatggtggagctaagatcacaggatacattgttgaacgcagagaactaccagatggccggtggctaaagtgcaattatactaatatacaagaaacatactttgaagtaactgaacttactgaagatcagcgttatgaattccgggtttttgcaaggaatgctgctgactcagttagtgagccatctgaatccactgggcctattatagttaaagatgatgttgagcctccaagagttatgatggatgtcaagttccgagacgttattgttgtcaaagctggagaggtccttaagataaatgcagacattgcagggcgacctctgccagtaatttcctgggccaaggatggtatagaaattgaagaaagagcaagaacagaaatcatctcaacagacaatcatactttgttaacagttaaagactgtataagacgagacactgggcaatatgtactaacactgaagaatgttgccggcactcggtctgtggccgttaattgcaaagtacttgataagcctggtccaccagcaggaccacttgaaataaatggcctcactgctgagaaatgctctctttcctggggacgtccccaagaagatggtggtgcagatatcgactattaccatcgtaaaaaacgtgaaacaagccaccttgcatggacaatatgtgaaggagagttacagatgacatcctgtaaagtaaccaagttactcaaaggcaatgaatatatatttagagtaactggtgttaataaatatggtgttggtgagcccctagagagtgtagctataaaggcactagatccatttacagttccaagtccacccacgtctttggaaattacttctgtgaccaaagaatctatgacactttgctggtcaagacccgagagtgatggaggtagtgaaatatctggatatataattgaaaggcgagagaaaaatagcctaagatgggtgcgtgtaaacaaaaaaccagtttatgatctaagagtgaaatcaacaggacttcgggaaggatgtgaatatgaatatcgtgtttatgcagaaaatgctgctggcctaagtcttccaagtgaaacctctcccttaattagggcagaagatccagtgttcctaccatctcctccatccaaacccaaaattgtggactcaggcaagacaactataactattgcctgggttaagccgctgtttgatggtggggccccgataactggatatactgtagaatacaaaaaatctgatgacactgactggaaaacttccattcagagcttacgagggacagaatatacaataagcggactaacaacaggagctgaatatgttttcagagtaaaatctgtcaataaggttggtgctagtgaccccagtgatagctctgaccctcagatagcaaaggaaagagaagaagaacctttatttgatattgacagtgaaatgaggaagaccttgattgtcaaggctggtgcctcatttaccatgactgtgcctttccgaggaagaccagtacccaatgtcttgtggagtaagccagacactgacctccgtactagagcttatgttgataccacagactctcgtacatcactgaccattgaaaatgccaacagaaatgactctggaaagtacacattaacaattcagaatgttttgagtgctgcttcactgaccttagttgtcaaagttttagataccccaggtcctccaaccaacattactgtgcaagatgtaaccaaagagtctgcagtgttatcctgggatgttcctgaaaacgatggtggagcaccagtgaagaattaccacatagaaaaacgtgaggccagcaagaaagcatgggtctctgtgaccaacaactgtaaccgcctctcctacaaagttaccaatttacaagaaggagctatctattacttcagagtctctggagaaaatgagtttggtgttggtataccagctgaaacaaaggaaggagtaaaaataacagaaaaaccaagcccacctgaaaaacttggagtaacaagtatatccaaagacagtgtttccctgacctggctgaagcctgaacatgatggcggaagcagaattgtacactatgtcgttgaagcactagaaaaaggacagaaaaactgggttaaatgtgcagtggcaaagtcaacccatcacgttgtttccggtctgagagagaattctgaatactttttccgagtgtttgctgaaaatcaagctggcctgagtgacccgagagagcttctgcttcctgttcttattaaggagcaactagaaccacctgaaattgatatgaagaatttcccaagtcacactgtatatgttagagctggttcaaaccttaaagttgacattccaatctctggaaaaccacttcccaaagtgaccttatcaagagatggtgtcccccttaaggcaaccatgagatttaataccgaaattactgctgagaacctgaccatcaatctcaaagaaagtgttacagctgacgctgggagatatgaaatcactgctgccaactccagtggtacaaccaaagctttcattaacattgttgtgctagacaggcctggtcctccaactggccctgttgttattagtgatataactgaagaaagtgtgactctcaaatgggagccacctaagtatgacggtggaagtcaagttaccaactacattctactcaaaagagaaacaagtactgcagtgtggactgaagtgtctgcaacagttgcaagaaccatgatgaaagtcatgaaactgaccacaggagaagaataccaattccgcatcaaggcagaaaaccgctttggcatcagtgatcatatagattcagcttgtgtgactgtcaaactaccatacacaacacctggaccaccatctacaccatgggtcactaatgttactcgagaaagcatcactgtgggctggcatgaaccagtgtcaaatggaggcagtgcagtcgtaggctatcacctggaaatgaaagacagaaacagtattttatggcaaaaagccaacaaactggtcatccgcacaactcacttcaaagtcacaacaatcagtgctggacttatttatgaattcagggtgtatgcagaaaatgctgctggagttggaaaacctagccatccttctgaaccagtcttggcaattgatgcttgtgaacccccaagaaatgttcgtatcactgatatttcaaagaactctgtcagcctttcatggcaacaaccagctttcgatggaggtagcaagattacaggctacattgttgagagacgtgaccttccagatggcagatggaccaaggccagcttcaccaatgttactgaaactcaattcaccatctctggcttgactcagaattcccagtatgaattccgtgtctttgctaggaatgctgttggttccattagcaatccatctgaggttgtagggcccattacttgcatcgattcttatggtggtcctgtaattgatttgcctctagaatatacagaagttgtcaaatacagagcaggtacatctgtgaagctcagagctggcatttctggcaaacctgcgcctactattgagtggtataaagatgataaagaattacaaaccaatgcactggtgtgtgttgaaaataccacggacctcgcatctatactcatcaaagatgccgatcgccttaatagtggatgctatgaattaaaactaaggaatgccatggcgtcagcctcagccaccatcagagtacagatccttgacaaaccaggcccacctggtggaccaattgaatttaagactgtaactgctgagaagatcacccttctctggcggcctccagctgatgatggtggtgcaaaaatcactcactacattgtggaaaagcgtgagacaagccgcgttgtgtggtctatggtgtctgaacatttggaagagtgcatcattacaaccaccaaaattatcaaaggaaatgaatacatcttccgggtccgagccgtgaacaaatatggaattggcgagccactggaatctgattccgttgtagccaagaacgcatttgttacacctgggccaccaggcataccagaagtgacaaagattaccaagaattcgatgactgttgtatggagcaggccaattgcagatggcggtagtgatataagtggctatttccttgaaaaacgagacaagaagagcctaggatggtttaaagtactaaaagagactatccgtgacaccagacaaaaagtaacaggactcacagaaaacagtgactatcaatacagagtttgtgctgtaaacgctgctggacagggtccattttctgaaccatctgaattctacaaagctgctgatcctattgatcctccaggtccacctgctaagataagaatcgcagattcaaccaagtcatccatcacccttggctggagtaagcctgtctatgatgggggcagtgctgttactgggtatgttgtcgagataagacaaggagaggaagaggaatggactactgtctctaccaaaggagaggtcagaactacagaatatgtggtatccaacctgaaacctggagtcaattactacttccgggtatctgctgtaaactgtgctggacaaggagaacctatagaaatgaatgaacctgtacaagctaaagatatacttgaggcaccagagattgacctggatgtggctctcagaacttctgttattgccaaagctggtgaagatgtacaagtgttgattccctttaaaggcagacctccacctactgtcacatggagaaaagatgagaagaatcttggcagtgatgccagatacagcattgaaaacactgattcatcctcattactcaccattcctcaagttactcgcaatgatacaggaaaatatattctcacaatagaaaatggagttggtgaacctaagtcttcaactgtgagtgttaaagtgcttgacacaccagctgcctgccagaaactacaggttaaacatgtttctcgaggcacagtcactttgctctgggatcctcctctcattgatggaggatctccaataattaattatgtcattgaaaagagagatgccaccaagagaacatggtctgtcgtgtcacacaaatgttctagcacatccttcaagctaatagatttgtcggagaagactccattcttcttcagagttcttgcagaaaatgaaattggaattggggaaccctgtgaaactacagagccagtgaaggctgctgaagtaccagctcctatacgtgatctctcaatgaaagactcaacaaagacatctgtcatcctcagctggaccaaacctgactttgatggtggtagcgtcatcacagaatatgttgtagaaaggaaaggtaaaggtgaacagacgtggtcccacgctggcataagtaagacatgtgaaattgaggttagccaacttaaggagcagtcagtcctggagttcagagtgtttgccaaaaatgagaaaggactgagtgatcctgtcactattgggccaattacagtgaaagaacttattattacacctgaagttgacctgtcagatatccctggggcacaagtcactgtgagaattgggcacaatgtgcaccttgaattaccttataagggaaaacccaaaccatccatcagttggctgaaagatggcttgccactgaaagaaagtgaatttgttcgcttcagtaaaactgaaaacaaaattactttgagtattaagaatgccaagaaggagcatggaggaaaatacactgttattcttgataatgcagtgtgtagaattgcagtccccattacagtcatcacccttggcccaccatcaaagcccaaaggacccattcgatttgatgaaatcaaggctgatagtgtcatcctgtcatgggatgtacctgaagataatggaggaggagaaattacttgttacagcatcgagaagcgggaaacttcacaaactaactggaagatggtgtgttcaagtgttgccagaacgactttcaaagttcctaatctagtcaaagatgctgaataccagtttagagtgagagcagaaaacagatacggagtcagccaaccacttgtctcaagcattattgtggcaaaacaccagttcaggattcctggtcccccaggaaagccagttatatacaatgtgacttctgatggcatgtcactaacttgggatgctccagtttatgatggtggttcagaagttactggattccatgttgaaaagaaagaaagaaatagcatcctctggcaaaaagttaatacatcaccaatctctggaagagaatatagagccactggactggtagaaggtctggattaccaattccgtgtatatgctgaaaattctgctggcctaagctcacctagtgacccaagcaaatttaccttagctgtttctccagtagacccacctggcactcctgactacattgatgtcacccgggaaaccatcacacttaaatggaacccaccattgcgtgatggaggcagtaagattgtgggctatagcattgagaaacggcaaggaaatgaacgctgggtgagatgcaactttactgacgtcagtgaatgtcagtacacagttacaggactcagtcctggggatcgctatgagttcagaataattgcaagaaatgctgttggaactataagcccgccctcacagtcttctggcattattatgacaagagatgaaaatgttccaccaatagtagagtttggccctgaatactttgatggtctcattattaagtccggagagagccttagaattaaagctttggtacaaggaagaccagtgcctcgagtaacttggttcaaagatggagtggaaatcgaaaagaggatgaatatggaaataaccaacgtacttggatccaccagcctatttgttagagatgctactcgggaccatcgtggtgtatacacagtggaagccaaaaatgcatctggttctgcaaaagcagaaattaaagtgaaagtacaagatacaccaggaaaagtagttgggccaataagattcaccaatattactggggagaagatgactctgtggtgggatgccccactcaatgacggttgtgctcccataacccactacatcattgaaaaacgggaaaccagcagacttgcctgggcactaattgaggataaatgtgaagcccaaagttacactgccattaaactaataaacggcaatgaataccaattccgtgtttctgcagttaacaagtttggtgttggcaggccacttgattctgatccagtggttgctcaaatacaatatactgttcctgatgcccctggcattccagaacctagcaacataacaggcaacagcattaccctgacatgggcaaggccagaatcagatggtggcagtgaaattcaacagtatatccttgaaagaagagaaaagaaaagcacaagatgggtaaaagtgatcagcaaacgaccaatctctgaaacaagattcaaagtcactggtctgacagaaggcaatgagtatgaattccatgtcatggctgaaaatgctgcaggagttggacctgcaagtggcatctcaagactcattaaatgtagagagcccgtcaacccaccaggtcctcccacagtggtcaaagtaacagacacatcaaagacaactgtgagcttagaatggtccaaaccagtgtttgatggtggcatggaaataattgggtatattattgaaatgtgtaagaccgacttaggagactggcacaaggtgaatgcagaggcatgtgtgaaaacaagatatacagtcactgatctacaagcaggtgaagaatacaaattccgagttagtgctatcaatggtgctggaaaaggcgacagctgtgaagtgactggcacaattaaagcagttgaccggttaacagctcctgagttagacatagatgcaaacttcaaacagactcatgttgttagagctggggccagtattcgcctcttcattgcctaccaaggtagacctactcctacagctgtgtggagcaaaccagactctaaccttagccttcgggctgatatccatacaacagattccttcagcaccctcactgtggaaaactgcaacagaaatgatgcagggaaatatacccttactgtggaaaacaacagtggtagtaagtcaatcacattcaccgtgaaagtgctagacactccaggcccacctggcccaattaccttcaaagatgtgacccggggatctgctacattgatgtgggatgcccctcttcttgacggtggtgcccgaatccatcattatgtggtagagaaacgagaggcaagtcgccgtagttggcaggttatcagtgaaaaatgcactcgtcagatcttcaaggtcaatgacctggccgaaggtgttccgtactatttccgtgtttctgcagtaaatgagtatggtgttggtgagccctatgaaatgccagaaccaattgtagccacggaacagcctgctccacctaggagacttgatgttgttgatactagcaaatcctccgcagtcttagcttggcttaaacctgaccacgatggaggcagccggatcactggctacctgcttgaaatgagacaaaagggatctgacctctgggttgaagctggtcacaccaaacagctaactttcacagtagagcgtcttgttgagaaaactgaatatgaattccgtgtgaaggccaagaatgatgctggctatagtgaacccagagaagccttctcttctgtcatcattaaggagcctcaaatcgagcccactgctgacctcactggaattaccaatcagcttataacttgcaaagcaggaagcccatttaccattgacgtaccaatcagtggtcgtcctgcccccaaagtaacatggaaactggaagaaatgagacttaaagagacagatcgagtgagcattacaacaacaaaagacagaaccacactgactgtaaaggacagcatgagaggtgactctggaagatacttcttgaccctggaaaatacagctggtgttaaaacatttagcgtcacagttgtggtcattggaaggccaggtccagtaaccggccccattgaggtctcatctgtctcagctgaatcgtgtgtcctgtcatggggagaacctaaagatggaggaggcactgaaattactaattacatagttgaaaagcgtgaatcgggtacaacagcttggcagcttgtcaattccagtgtcaagcgcactcaaattaaagtcactcatctcacaaaatacatggaatattctttccgtgtcagttcagagaacagatttggtgtcagcaaacctctagaatcagcaccaataattgctgaacatccatttgtcccaccaagcgctcctaccagacctgaggtctaccatgtgtctgccaatgccatgtctattcgttgggaagaaccctaccacgatggtggcagtaaaatcattggctactgggttgagaagaaagaacgtaatacaattctttgggtgaaagaaaacaaagtgccatgcttagagtgcaactacaaagtaactggtttagtagaaggactggaatatcagttcagaacttatgcactcaatgctgcaggtgttagcaaggccagcgaagcttcaagacctataatggctcaaaatccagttgatgcaccaggcagaccagaggtgacagatgtcacaagatcaacagtatcactgatttggtctgccccagcgtatgatggaggcagcaaggttgtgggctacatcatagagcgtaagccagtcagtgaggtaggagatggtcgctggctgaagtgcaactacaccattgtatctgacaatttcttcaccgtgactgctctcagtgaaggagacacttatgagttccgtgtgttagccaagaatgcagcaggcgtaattagcaaagggtctgaatctacaggccctgtcacttgccgagatgaatacgctccacccaaagccgaactggatgcccgattacacggtgatctggttaccatcagagcaggttctgatcttgttctggatgctgcagttggtggcaaacctgaacccaaaattatctggaccaaaggagacaaggagctagatctctgtgaaaaagtctctttgcagtatactggcaaacgagcaactgctgtgatcaagttctgtgacagaagtgacagtggaaaatacactttaacagtgaaaaatgccagcgggaccaaggccgtgtctgtcatggtcaaagtgcttgattcccctggcccatgtggaaagctcaccgtcagcagagtaacacaggagaagtgcactttagcctggagccttccgcaggaagacggaggagcagaaatcactcactacatcgtggaaagacgcgagactagcaggctcaactgggtgattgttgaaggcgaatgcccaaccctatcctatgtcgttaccaggctcatcaagaacaatgagtacatattccgagtgagggcagtaaacaaatatggccctggtgtgcctgttgaatcagagccaattgtagccagaaactcattcactattccatcaccacccggcatacctgaagaagttgggactggcaaagagcatatcatcattcagtggacaaaacctgaatctgatggtggcaatgaaatcagcaactacctagtagacaaacgtgagaaggagagcctgcgctggacacgtgtcaacaaagactatgtggtgtatgataccaggctgaaggtgaccagcctgatggagggttgtgattaccagttccgggtgaccgcagtgaatgcagctggtaacagtgagcccagcgaacgttccaacttcatctcatgcagagaaccatcatatacccctggaccaccttctgctccaagagttgtggataccaccaaacacagcattagtttggcatggaccaaacccatgtacgatggtggtactgacattgtaggatatgttctggaaatgcaagagaaggacactgatcagtggtaccgagtgcataccaatgccacaataagaaatactgaattcactgtgccagaccttaaaatgggccagaaatattccttcagagttgctgccgtgaacgtgaagggtatgagcgaatacagcgaatcaattgctgaaattgagcccgtggaaagaatagaaataccagatcttgagcttgcagatgatctaaagaagactgtgaccatcagggctggggcctccttgcgcttgatggtgtctgtatctggaagaccacctcctgtcataacgtggagcaagcagggcattgaccttgcaagccgggcaattattgacaccactgagagctactcattgctaatagtggacaaagttaatcggtacgatgctggaaaatacacaattgaagctgaaaaccaatctggcaagaaatcagcaacagtccttgttaaagtctatgatactcctggtccctgtccttcagtgaaagttaaggaagtatcaagagattctgtgactataacttgggaaattcccacgattgatggtggagctccaatcaacaattacatcgttgagaagcgtgaagctgctatgagagcattcaaaacagtaactaccaaatgcagcaagacactttacagaatttctggacttgtagaaggaaccatgcactatttcagagtgctgccagaaaatatttatggcattggagaaccttgtgaaacatctgatgcagtactggtctcagaagtgcctttggtgcctgcaaagctagaagtggtcgatgtcaccaaatccactgttacccttgcctgggaaaaaccactctacgatggtggtagccgactcactggatatgttctcgaggcctgcaaagctggcacagagagatggatgaaggttgtcaccttaaaacccacagtcctagagcacactgttacttccttaaatgaaggtgaacaatacttatttagaataagggcacaaaatgagaaaggtgtgtcagaaccaagagagactgtcacagccgtgactgtacaagacctcagagtgttgccaacaatcgatctttctacaatgcctcagaagaccatccatgtcccagctggcagaccagtagagctggtgatacctattgctggccgtccacctcctgctgcttcctggttctttgctggttctaaactgagagaatcagagcgtgtcacagttgaaactcacactaaagtagctaaattaaccatccgtgaaaccactatcagagatactggagaatacacacttgaattgaagaatgttaccggaactacttcagaaaccattaaagttatcattcttgacaagcctggtccaccaacaggacctattaagattgatgaaattgatgctacatcaattaccatttcctgggaaccacctgaattggacggtggtgctccactgagtggttatgtggtagaacaacgtgacgctcatcgtccaggatggctgcccgtttctgaatcagtgactaggtccacgtttaagtttaccagactcaccgaaggaaatgagtatgtgttccgtgtggctgcaacaaaccgcttcgggattggctcttacttgcagtctgaggtcatagagtgtcgcagcagcatccgtattcctggacccccagaaacattacagatatttgatgtttcccgtgatggcatgacacttacttggtacccaccagaggatgacggtggctcccaagtgactggatatattgtggagcgcaaagaagtgagagcagatcgatgggtccgtgtaaataaagtacctgtgacaatgacacggtaccgctccactggccttactgaaggcttagaatatgaacaccgtgtcacagccattaatgcaagagggtctgggaaaccaagtcgtccttccaaacccatcgttgccatggatccaattgctcctccaggaaagccacaaaacccaagagttactgatacaacaaggacatcagtctccctggcctggagtgttccagaagatgaaggaggatctaaagtcacaggctacttgattgaaatgcaaaaagtagatcaacatgaatggaccaagtgtaacaccactccaaccaagattcgagagtatactctaacacacctacctcagggtgcagaatacaggttccgcgtcctagcttgtaatgctggtggacctggtgagcctgctgaggtaccaggaacagtcaaagtcactgaaatgcttgaatatcctgattatgaacttgatgaaagataccaagaaggtatctttgtaaggcaaggtggcgtcatcagacttaccataccaatcaaaggaaaaccattcccaatatgtaaatggaccaaggaaggccaggatattagtaagcgtgccatgattgcaacatctgaaacacacactgagcttgtgatcaaagaagcagacaggggtgattctggcacttatgacctggttctggaaaataaatgtggcaagaaggctgtctacatcaaggtcagggtgataggaagtcccaacagtccagaagggccactggaatatgatgacatccaagtccgctctgtgagggtcagctggagacctcctgctgatgatggtggtgctgacatcttaggctacatcctcgagagacgagaagtgcctaaagccgcctggtataccattgattccagagtccgaggtacatctctggtggtaaaaggcctcaaagagaatgtagaataccatttccgtgtttcagcagaaaaccagtttggcataagcaaacccttgaaatctgaggaaccagtcacaccaaaaacaccattgaatcctccagaacctccaagcaatcctccagaagtactcgatgtaaccaagagttctgttagcttgtcctggtcccggcccaaagatgatggtggttctagagtcacaggctactacatcgaacgcaaagagacatccactgacaaggtggtcagacacaacaagactcagatcaccaccacaatgtacactgtcacagggcttgttcccgatgctgagtatcagttccgcatcatcgcacagaatgatgttggcctgagtgagaccagccctgcttctgaaccagttgtttgcaaagatccatttgataaaccaagccaaccaggagaacttgagattctttcaatatccaaagatagtgtcactctacagtgggagaaacctgaatgtgatggtggtaaagaaattcttggatactgggttgaatatagacagtctggagacagtgcctggaagaagagcaataaggaacgtattaaggacaagcaattcacaataggaggtttgctggaagctactgagtatgaattcagggtttttgctgagaatgagactgggctgagcagacctcgcagaactgctatgtctataaagactaaactcacatctggagaggccccaggaatacgcaaagaaatgaaggatgttaccacaaaattgggtgaagctgctcaactctcatgccagattgttggaaggcctcttcctgacattaaatggtacagatttggtaaagagctcatacaaagccggaaatacaaaatgtcttcagatggacgcacacacactcttacagtaatgacagaggaacaggaagatgaaggtgtttatacctgcatagccaccaatgaggttggagaagtagaaaccagtagtaagcttctcctgcaagcaacaccgcagttccatcctggttacccactgaaagagaaatattatggagctgtgggttccacacttcggcttcatgttatgtacattggtcgtccagtacctgccatgacttggttccatggtcagaaacttttgcaaaactcagaaaacattactattgaaaacactgagcactatactcatcttgtcatgaagaatgtccaacgtaagactcatgctgggaaatacaaagtccagctcagcaatgtttttggaacagttgatgccatccttgatgtggaaatacaagataaaccagacaaacctacaggaccaattgtgatcgaagctctattgaagaactccgcagtgatcagctggaaaccacccgcagatgacggaggctcctggatcaccaactatgtggtggaaaaatgtgaggccaaggagggggctgaatggcaattggtgtcttcagccatctcagtgacaacctgtagaattgtgaacctcacagaaaatgctggctattacttccgggtttcagctcagaacactttcggcatcagtgaccctctagaagtgtcctcagttgtgatcattaagagtccatttgaaaagccaggtgctcctggcaaaccaactattactgctgtcacaaaagattcttgtgttgtggcctggaagccacctgccagtgatggaggtgcaaagattagaaattactaccttgagaagcgtgagaagaagcagaataaatggatttctgtgacaacagaagaaattcgagaaactgtcttttcagtgaaaaaccttattgaaggtcttgaatacgagtttcgtgtgaaatgtgaaaatctaggtggggaaagtgaatggagtgaaatatcagaacccatcactcccaaatctgatgtcccaattcaggcaccacactttaaagaggaactgagaaatctaaatgtcagatatcagagcaatgctaccttggtctgcaaagtgactggtcatccaaaacctatcgtcaaatggtacagacaaggcaaagaaatcattgcagatggattaaaatataggattcaagaatttaagggtggctaccaccagctcatcattgcaagtgtcacagatgatgatgccacagtttaccaagtcagagctaccaaccaagggggatctgtgtctggcactgcctccttggaagtggaagttccagctaagatacacttacctaaaactcttgaaggcatgggagcagttcatgctctccgaggtgaagtggtcagcatcaagattcctttcagtggcaaaccagatcctgtgatcacctggcagaaaggacaagatctcattgacaataatggccactaccaagttattgtcacaagatccttcacatcacttgttttccccaatggggtagagagaaaagatgctggtttctatgtggtctgtgctaaaaacagatttggaattgatcagaagacagttgaactggatgtggctgatgttcctgacccacccagaggagtcaaagttagtgatgcctcacgagattctgtcaacttaacatggactgagccagcctctgatggtggcagcaaaatcaccaactacattgttgaaaaatgtgcaactactgcagaaagatggctccgtgtaggacaggcccgagaaacacgttataccgtgatcaacttatttggaaaaacaagttaccagttccgggtaatagctgaaaataaatttggtctgagcaagccttcagagccttcagaaccaaccataaccaaagaagataagaccagagctatgaactatgatgaagaggtagatgaaaccagggaagtctccatgactaaagcatctcactcttcaaccaaggaactctatgagaaatatatgattgctgaagatcttgggcgtggtgagtttggaattgtccatcgttgtgttgaaacatcctcaaagaagacatacatggccaaatttgttaaagtcaaagggactgatcaggttttggtaaagaaggaaatttccattctgaatattgctaggcatagaaacatcttacacctccatgaatcatttgaaagcatggaagaattagttatgatctttgagtttatatcaggacttgacatatttgagcgcattaacacaagtgcttttgaacttaatgaaagagaaattgtaagttatgttcaccaggtctgtgaagcacttcagtttttacacagtcataatattggacactttgacattagaccagaaaatatcatttaccaaaccagaagaagctctaccattaaaatcatagaatttggtcaagcccgtcagctgaaaccaggggacaacttcaggcttctattcactgccccagaatactatgcacctgaagtccaccagcatgatgttgtcagcacagccacagacatgtggtcacttggaacactggtatatgtgctattgagtggtatcaacccattcctggctgaaactaaccaacagatcattgagaatatcatgaatgctgaatatactttcgatgaggaagcattcaaagagattagcattgaagccatggattttgttgaccggttgttagtgaaagagaggaaatctcgcatgacagcatcggaggctctccagcacccatggttgaagcagaagatagaaagagtcagtactaaagttatcagaacattaaaacaccggcgttattaccacaccctgatcaagaaagacctcaacatggttgtgtcagcagcccggatctcctgtggtggtgcaattcgatctcagaagggagtgagtgttgctaaagttaaagtggcatccattgaaattggcccagtttctgggcagataatgcatgcagttggtgaagaaggaggacatgtcaaatatgtatgcaaaattgaaaattatgatcagtctacccaagtgacttggtactttggtgtccgacagctggagaacagtgagaaatacgaaatcacctacgaagatggagtggccatcctctatgtcaaagacattaccaaattagatgatggtacctacagatgcaaagtagtcaatgactatggtgaagacagttcttatgcagagctatttgttaaaggtgtgagagaagtctatgactattactgccgtagaaccatgaagaaaattaagcgcagaacagacacaatgagactcctggaaaggccaccagaatttaccctgcctctctataataagacagcttatgtaggtgaaaatgtccggtttggagtaactataactgtccacccagagcctcatgtaacatggtataaatcaggtcagaaaatcaaaccaggtgacaatgacaagaagtacacatttgagtcagacaagggtctttaccaattaacaatcaacagtgtcactacagatgatgacgctgaatatactgttgtggcaaggaacaaatatggtgaagacagctgtaaagcaaagctgacagtaaccctacacccacctccaacagatagtaccttaagacccatgttcaaaaggttactggcaaatgcagaatgccaagaaggccaaagtgtctgctttgagatcagagtgtctggcatccccccaccaacattaaaatgggagaaagatggtcagccactgtccctcgggcctaacattgaaattatccatgaaggcttggattattatgctctgcacatcagggacactttgcctgaagacacgggttattatagagtcacagccactaacacagctgggtccaccagctgccaggctcacctacaagtggaacgcctgaggtacaagaaacaggaattcaagagtaaggaggagcatgagcgacacgtacaaaaacaaattgacaaaaccctcagaatggctgaaattctttctggaactgaaagtgtaccactgacacaggtagctaaagaggctctgagagaagctgctgtcctttataaaccggctgtaagcaccaagactgtaaaaggggaattcagacttgagatagaagaaaagaaggaggagagaaaactccggatgccttatgatgtaccagagccacgcaagtataagcagactaccatagaagaagaccaacgcatcaagcagttcgtgcccatgtctgacatgaagtggtataaaaagatacgtgatcagtatgaaatgcctgggaaacttgacagagttgtacagaaacgacccaagcgcatccgcctttcaagatgggaacagttctatgtgatgcctcttccacgcattacagatcaatacagacctaaatggcgtattcctaaactgtcccaagatgatcttgagatagtgagaccagcccgccggcgtacaccttctcctgattatgacttttactaccgacctagaagacgttctcttggggacatctctgatgaagaattactcctccccattgatgactacttagcaatgaaaagaacagaggaagagaggctgcgtcttgaagaagagcttgagttaggtttttcagcttcacccccaagtcgaagccctccacactttgagctttctagcctacgttactcttcaccacaagctcatgtcaaggtggaggaaacaagaaaaaacttcaggtattcaacctatcacatcccaacgaaggctgaagctagtacaagttatgcagaactgagggaacggcatgcccaggctgcgtacagacagccaaagcaacggcaaagaatcatggctgagagggaggatgaagagttgcttcgcccagttacgaccacccagcatctctcagaatacaaaagcgaacttgacttcatgtcaaaggaggaaaagtctagaaagaaatcaaggcgacaaagagaagtgacagaaataacagaaattgaggaagaatacgaaatctcaaaacatgctcaaagagaatcatcctcatctgcgtctagactactgagacgacggcgctccctgtctccaacttatattgagttaatgaggccagtgtctgagctgatccggtcacgtccacaaccggctgaggaatacgaagatgacacagaaagaaggtcacctactccagagagaactcgcccacgatcccccagccctgtgtctagtgagagatcactctcgagatttgagaggtctgcaagatttgatatcttttccaggtatgagtccatgaaagctgctttaaaaactcagaagacatcagaaaggaagtatgaagttttgagtcagcagcctttcacactggaccatgcccctcgaatcacactgagaatgcgctcgcacagggtaccatgtggccaaaatacacgttttattttaaatgttcagtctaagccaactgccgaagttaaatggtaccacaatggtgtggaactccaagaaagcagtaagattcattacaccaacacgagtggagttctcaccctggaaattctggactgtcatactgatgacagtggaacctaccgtgctgtgtgcaccaactacaagggcgaagcttctgactatgcaacgttggacgtgacaggaggggattataccacctatgcttcccaacgcagagatgaagaggtccccagatctgttttccctgagctgacaagaacagaggcgtatgctgttccatcatttaagaaaacatctgagatggaagcttcgtcttctgtcagggaagtgaaatcacagatgacggagacaagggaaagtctctcctcatatgaacactctgcatctgcagaaatgaaaagtgctgcattagaagaaaagtcactggaagaaaaatccacaaccagaaagatcaagacgactttggcggcaagaattctaacaaagccacggtccatgaccgtctacgagggcgagtctgcaaggttttcttgtgacaccgatggtgagccggtaccaactgtgacctggctgcgtaaaggacaagtgctaagtacttctgcccgccaccaagtgaccaccacaaagtacaaatcaacctttgagatctcttcagtccaggcttccgatgagggcaattacagcgtggtggtagaaaacagtgaagggaaacaagaagcagagttcactctgactattcaaaaggccagggtaactgaaaaggctgtgacatcaccaccaagagtcaaatccccagagcctcgggtgaaatccccagaagcagttaagtctccaaaacgagtgaaatctccagaaccttctcacccgaaagccgtatcacccacagagacaaaaccaacaccaagagagaaagttcagcacctcccagtctctgccccaccaaagattactcagttcctgaaagcagaagcttctaaagagattgcaaaactgacctgtgtggttgaaagcagtgtattaagggcaaaagaggtcacctggtataaagatggcaagaaactgaaggaaaatgggcatttccagtttcattattcagcagatggtacctatgagctcaaaatcaataacctcactgaatctgatcaaggagaatatgtttgtgagatttctggtgaaggtggaacgtctaaaaccaacttacaatttatggggcaagcctttaagagtatccatgagaaggtatcaaaaatatcagaaactaagaaatcagatcagaaaaccactgagtcaacagtaaccagaaaaactgaaccaaaagctcctgaaccaatttcctcaaaaccagtaattgttactgggttgcaggatacaactgtttcttcagacagtgttgctaaatttgcagttaaggctactggagaaccccggccaactgccatctggacaaaagatggaaaggccattacacaaggaggtaaatataaactctctgaagacaagggagggttcttcttagaaattcataagactgatacttctgacagtggactttatacttgtacagtaaaaaattcagctggatctgtgtcctctagctgcaaattaacaataaaagctataaaagatactgaggcacagaaagtctctacacaaaagacttctgaaattacacctcagaagaaagctgttgtccaagaggaaatttcccaaaaagccctaaggtctgaagaaattaagatgtcagaggcaaaatctcaagaaaagttagccctcaaagaggaagcttcaaaggttctgatttctgaagaagtcaagaaatcagcagcaacctccctggaaaaatccattgtccatgaggaaatcactaaaacatcacaggcatcagaagaagtcagaactcatgctgagattaaagcattttctactcagatgagcataaacgaaggtcaaagactggttttaaaagccaacattgctggtgccactgatgtgaaatgggtactgaatggcgtagagcttaccaactctgaggagtaccgatatggtgtctcaggcagcgatcagaccctaaccatcaagcaagccagtcacagagatgaaggaatcctcacctgcataagcaaaaccaaggaaggaatcgtcaagtgtcagtatgatttgacactgagcaaagaactctcagatgctccagccttcatctcacagcctagatctcaaaatattaatgaaggacaaaatgttctctttacttgtgaaatcagtggcgagccatcccctgaaatcgaatggtttaaaaacaacctgccaatttctatttcttcaaatgtcagcataagccgctccagaaatgtatactcccttgaaatccgaaatgcatcagtcagcgacagtggaaagtacacaattaaggccaaaaatttccgtggccagtgttcagctacagcttccttaatggtccttcctctagttgaagaaccttccagagaggtagtattgagaacaagtggtgacacaagcttgcaaggaagcttctcgtctcagtcagtccaaatgtctgcctccaagcaggaggcctccttcagcagtttcagcagcagcagtgctagcagcatgactgagatgaaatttgcaagcatgtctgcccaaagcatgtcctccatgcaagagtcctttgtagaaatgagttccagcagctttatgggaatatctaatatgacacaactggaaagctcaactagtaaaatgcttaaagcaggcataagaggaattccgcctaaaattgaagctcttccatctgatatcagcattgatgaaggcaaagttctaacagtagcctgtgctttcacgggtgagcctaccccagaagtaacatggtcctgtggtggaagaaaaatccacagtcaagaacaggggaggttccacattgaaaacacagatgacctgacaaccctgatcatcatggacgtacagaaacaagatggtggactttataccctgagtttagggaatgaatttggatctgactctgccactgtgaatatacatattcgatccatttaagagggcctgtgccttatactctacactcattcttaacttttcgcaaacgtttcacacggactaatctttctgaactgtaaatatttaaagaaaaaaagtagttttgtatcaacctaaatgagtcaaagttcaaaaatattcatttcaatcttttcataattgttgacctaagaatataatacatttgctagtgacatgtacatactgtatatagccggattaacggttataaagttttgtaccatttattttatgacattttacaatgtaagttttgaaactaactgttggtaggagaaagtttcttatggaacgaataccctgctcaacatttaatcaatctttgtgcctcaacatactgttgatgtctaagtatgcctcagtgggttgagaaaatccccattgaagatgtcctgtccacctaaaagagaatgatgctgtgcatatcacttgatatgtgcaccaatacctactgaatcagaaatgtaaggcattggtgatgtttgcatttaccctcctgtaagcaacactttaacgtcttacattttctctgatgatgtcacacaaaattatcatgacaaatattaccagagcaaagtgtaacggccaacactttgttcgctcattttacgctgtctctgacataaggagtgcctgaatagcttggaaaagtaacatctcctggccatcccttcatttaaccaagctattcaagtattcctatgccagagcagtgccaactcttggaggtcccagagtgcagccaatgcctttgtgtggtagttctaaattttaattgcacctgaaaaacctgggcacctaagcaatgagccacagcaaaaagtaaagaacaacaacaaaataaagctgttgttaaattttaaacaatattactaattgcccaaaatgtcaatttgatgtagttcttttcatgcaagtataaattcaattgttagttataattgttggacctccttgagatagtaacaacaaaataaagcaagctatctgcacctcaaaaaaaaaa

SEQ ID NO: 725 - DNA, 511 bp, Homo sapiens
  Genbank Accession No. X93036
  unsure (1)..(511): n = a or c or g or t
cccgatttctcccggaacctctgctcagcctggtgaaccacacaggccagcgctctgacatgcagaaggtgaccctgggcctgcttgtgttcctggcaggctttcctgtcctggacgccaatgacctagaagataaaaacagtcctttctactatgactggcacagcctccaggttggcgggctcatctgcgctggggttctgtgcgccatgggcatcatcatcgtcatgagtgcaaaatgcaaatgcaagtttggccagaagtccggtcaccatccaggggagactccacctctcatcaccccaggctcagcccaaagctgatgaggacagaccagctgaaattgggtggaggaccgttctctgtccccaggtcctgtctctgcacagaaacttgaactccaggatggaattcttcctcctctgctgggactcctttgcatggcagggcctcatctcacctctcgcaagagggtctctttgttcaattttttttaatctaaaatgattan

SEQ ID NO: 726 - DNA, 1130 bp, Homo sapiens
  Genbank Accession No. X93510
tgagagtccggctcaggctccggctgcggctccagcccgcgatgccccattccgtgaccctgcgcgggccttcgccctggggcttccgcctggtgggccgggacttcagcgcgcccctcaccatctcacgggtccatgctggcagcaaggcctcattggctgccctgtgcccaggagacctgatccaggccatcaatggtgagagcacagagctcatgacacacctggaggcacagaaccgcatcaagggctgccacgatcacctcacactgtctgtgagcaggcctgagggcaggagctggcccagtgcccctgatgacagcaaggctcaggcacacaggatccacatcgatcctgagatccaggacggcagcccaacaaccagcaggcggccctcaggcaccgggactgggccagaagatggcagaccaagcctgggatctccatatggaaaacccccttgctttccagtccctcacaatggcagcagcgaggccaccctgccagcccagatgagcaccctgcatgtgtctccaccccccagcgctgacccagcagaggcctcccgcggagccgggagcagagtcgacctgggctccgaggtgtacaggatgctgcgggagccggccgagcccgtggccgcggagcccaagcagtcaggctccttccgctacttgcagggcatgctagaggccggcgagggcggggattggcccgggcctggcggcccccggaacctcaagcccacggccagcaagctgggcgctccgctgagcggcctgcaggggctgcccgagtgcacgcgctgctgccacggaatcgtgggcaccatcgtcaaggaacgggacaagctctaccatcccgagtgcttcatgtgcagtgactgcggcctgaacctcaagcagcgtggttacttctttctggacgagcggctctactgtgagagccacgccaaggcgcgcgtgaagccgcccgagggctacgacgtggtggcggtgtaccccaatgccaaggtggaactcgtctgagctgggaccctgctcccacccctgcttcttaaggtccctgctcggccggtgtaaatatgtttcaccctgtccctctaataaagctcctctgctcaaaaaaaa

SEQ ID NO: 727 - DNA, 1392 bp, Homo sapiens
  Genbank Accession No. X95325
gaattccggcacgaagctcgagccgcctccgccgcgcgaccccacctcggccgccgccgcctgcgccgcgagatccgccccggcctccccgagagcgagccccggccgccgcgaccaccagccgcgctaaccgccgaccaaccgccaccgaggcgcctgagcgagagcagaggaggaggaggcatgagtgaggcgggcgaggccaccaccaccaccaccaccaccctcccgcaggctccgacggaggcggccgccgcggctccccaggaccccgcgcccaagagcccggtgggcagcggtgcgccccaggccgcggccccggcgcccgccgcccacgtcgcaggaaaccccggtggggacgcggcccccgcagccacgggcaccgcggccgccgcctctttagccaccgccgccggcagcgaagacgcggagaaaaaagttctcgccaccaaagtccttggcactgtcaaatggttcaacgtcagaaatggatatggatttataaatcgaaatgacaccaaagaagatgtatttgtacatcagactgccatcaagaagaataacccacggaaatatctgcgcagtgtaggagatggagaaactgtagagtttgatgtggttgaaggagagaagggtgcagaagctgccaatgtgactggcccggatggagttcctgtggaagggagtcgttacgctgcagatcggcgccgttacagacgtggctactatggaaggcgccgtggccctccccggaattacgctggggaggaggaggaggaagggagcggcagcagtgaaggatttgacccccctgccactgataggcagttctctggggcccggaatcagctgcgccgcccccagtatcgccctcagtaccggcagcggcggttcccgccttaccacgtgggacagacctttgaccgtcgctcacgggtcttaccccatcccaacagaatacaggctggtgagattggagagatgaaggatggagtcccagagggagcacaacttcagggaccggttcatcgaaatccaacttaccgcccaaggtaccgtagcaggggacctcctcgcccacgacctgccccagcagttggagaggctgaagataaagaaaatcagcaagccaccagtggtccaaaccagccgtctgttcgccgtggataccggcgtccctacaattaccggcgtcgcccgcgtcctcctaacgctccttcacaagatggcaaagaggccaaggcaggtgaagcaccaactgagaaccctgctccacccacccagcagagcagtgctgagtaacaccaggctcctcaggcaccttcaccatcggcaggtgacctaaagaattaatgaccattcagaaataaagcaaaaagcaggccggaattc

SEQ ID NO: 728 - DNA, 333 bp, Homo sapiens
  Genbank Accession No. X99728
ggtctcatgggcatcgtgtttcctccgcagagccagccccagtgcctgctgagccgtttgacaacactacctacaagaacctgcagcatcatgactacagcacgtacaccttcttagacctcaacctcgaactctcaaaattcaggatgcctcagccctcctcaggccgggagtcacctcgacactgagggccctcggtgtgaagatgaaccttccaccgtcttcactgcatcctggagtgcaaaaataaaatccactcaagagtcacaaggcccgctgtgcataatcggtttcacttttaccttttttttttttttttttttttggagacag

SEQ ID NO: 729 - DNA, 1635 bp, Homo sapiens
  Genbank Accession No. Y08374
aaaggaagagaaagggagagagggagagaagagggagagagcagagagacctcaccgagagagctgcaaaaccagcctggaaaaattagagtattacctaacattagtgaaaaataaaggtactttcttgagaagcccttggacccattctgcctcctggagttctgaacttttcactcactgcctattaattaatgttaagcctgcaaagaatggagttgtcctggatatttggccaaaaaaaaaatgtatccacaaacagggacgtaatcaggcagggagcctcgttaagaagttttgttcttgtcctaggagtgatgagagatcactgaaggatttagagaggggctgtatcatcaggcttgggttccaaagcctcactgagagagttggggagctgactgatgtcagatgctcgtgcagccgccccgtagggcctgtatttcctccatggtgcctcactgcagcaccgagcttgcaaaagatcctctctctttatgggaatttcaaaacagaagcaaaatagcaccggggcttaaagcattcttgggaatttccctgtctttccctctaaataatcagcatgtaaattgcaaaaaaaaaaaaaaaaaaaaaagacacgggcccaaaagggagcgctcagtttcaggctctttgctttccttcctcccgaggctctctggcccttacccagcctgaaaacaaaaagtgtgagggggagggtaggaaggtagttcaagcagggcaatgctgagcctgggaagaaaacaacagccttgtttagggcactgtggcttacgtaactaaattgtgcccagtttccacctggccaggggcctggagtgaatgctgaagatgcaaaggtagaggctgccagaaaagccaggaaattgctggcaagaaaggccagtggtggggtgcaggagtgggaggaaggctgggaaatgcggctgagtcacatctccagaagccccccatcatcaccctagtggctcttctgctggcaggcgcctcatgaagacctgacccaaagttttcaaaactctgcggtttctcaaccctcctctggtaatccatagtactcccccgcctccacttgccagcctcgtgattccttcatggacacatagctcagttcccataaaagggctggtttgccgcgtgggggagtggagtgggacaggtatataaaggaagtacagggcctggggaagaggccctgtctaggtagctggcaccaggagccgtgggcaagggaagaggccacaccctgccctgctctgctgcagccagaatgggtgtgaaggcgtctcaaacaggtatctgggctagccaaggttaatccatcagagttgtgggttttcaggcccagacagcccgcagagccatctgcctgctgggtgagggactaagggagtgggcagagggggaggagaagcagagccaggggagggactgaggctgcaaccaggaggtgggggtgggggagtgggtctcagttgcttgggggagggagcagggcggaagggcaggatgcacttgcaggggtctcatcctggatttctcttcaggctttgtggtcctggtgctgctccagtgctgtgagtaatccctccacctccacttttaagtcca

SEQ ID NO: 730 - DNA, 4148 bp, Homo sapiens
  Genbank Accession No. Y08614
aggaaggaaggagcagttggttcaatctctggtaatctatgccagcaattatgacaatgttagcagaccatgcagctcgtcagctgcttgatttcagccaaaaactggatatcaacttattagataatgtggtgaattgcttataccatggagaaggagcccagcaaagaatggctcaagaagtactgacacatttaaaggagcatcctgatgcttggacaagagtcgacacaattttggaattttctcagaatatgaatacgaaatactatggactacaaattttggaaaatgtgataaaaacaaggtggaagattcttccaaggaaccagtgcgaaggaataaaaaaatacgttgttggcctcattatcaagacgtcatctgacccaacttgtgtagagaaagaaaaggtgtatatcggaaaattaaatatgatccttgttcagatactgaaacaagaatggcccaaacattggccaacttttatcagtgatattgttggagcaagtaggaccagcgaaagtctctgtcaaaataatatggtgattcttaaactcttgagtgaagaagtatttgatttctctagtggacagataacccaagtcaaatctaagcatttaaaagacagcatgtgcaatgaattctcacagatatttcaactgtgtcagtttgtaatggaaaattctcaaaatgctccacttgtacatgcaaccttggaaacattgctcagatttctgaactggattcccctgggatatatttttgagaccaaattaatcagcacattgatttataagttcctgaatgttccaatgtttcgaaatgtctctctgaagtgcctcactgagattgctggtgtgagtgtaagccaatatgaagaacaatttgtaacactatttactctgacaatgatgcaactaaagcagatgcttcctttaaataccaatattcgacttgcgtactcaaatggaaaagatgatgaacagaacttcattcaaaatctcagtttgtttctctgcacctttcttaaggaacatgatcaacttatagaaaaaagattaaatctcagggaaactcttatggaggcccttcattatatgttgttggtatctgaagtagaagaaactgaaatctttaaaatttgtcttgaatactggaatcatttggctgctgaactctatagagagagtccattctctacatctgcctctccgttgctttctggaagtcaacattttgatgttcctcccaggagacagctatatttgcccatgttattcaaggtccgtttattaatggttagtcgaatggctaaaccagaggaagtattggttgtagagaatgatcaaggagaagttgtgagagaattcatgaaggatacagattccataaatttgtataagaatatgagggaaacattggtttatcttactcatctggattatgtagatacagaaagaataatgacagagaagcttcacaatcaagtgaatggtacagagtggtcatggaaaaatttgaatacattgtgttgggcaataggctccattagtggagcaatgcatgaagaggacgaaaaacgatttcttgttactgttataaaggatctattaggattatgtgaacagaaaagaggcaaagataataaagctattattgcatcaaatatcatgtacatagtaggtcaatacccacgttttttgagagctcactggaaatttctgaagactgtagttaacaagctgttcgaattcatgcatgagacccatgatggagtccaggatatggcttgtgatactttcattaaaatagcccaaaaatgccgcaggcatttcgttcaggttcaggttggagaagtgatgccatttattgatgaaattttgaacaacattaacactattatttgtgatcttcagcctcaacaggttcatacgttttatgaagctgtggggtacatgattggtgcacaaacagatcaaacagtacaagagcacttgatagaaaagtacatgttactccctaatcaagtgtgggatagtataatccagcaggcaaccaaaaatgtggatatactgaaagatcctgaaacagtcaagcagcttggtagcattttgaaaacaaatgtgagagcctgcaaagctgttggacacccctttgtaattcagcttggaagaatttatttagatatgcttaatgtatacaagtgcctcagtgaaaatatttctgcagctatccaagctaatggtgaaatggttacaaagcaaccattgattagaagtatgcgaactgtaaaaagggaaactttaaagttaatatctggttgggtgagccgatccaatgatccacagatggtcgctgaaaattttgttccccctctgttggatgcagttctcattgattatcagagaaatgtcccagctgctagagaaccagaagtgcttagtactatggccataattgtcaacaagttagggggacatataacagctgaaatacctcaaatatttgatgctgtttttgaatgcacattgaatatgataaataaggactttgaagaatatcctgaacatagaacgaactttttcttactacttcaggctgtcaattctcattgtttcccagcattccttgctattccacctacacagtttaaacttgttttggattccatcatttgggctttcaaacatactatgaggaatgtcgcagatacgggcttacagatactttttacactcttacaaaatgttgcacaagaagaagctgcagctcagagtttttatcaaacttatttttgtgatattctccagcatatcttttctgttgtgacagacacttcacatactgctggtttaacaatgcatgcatcaattcttgcatatatgtttaatttggttgaagaaggaaaaataagtacatcattaaatcctggaaatccagttaacaaccaaatctttcttcaggaatatgtggctaatctccttaagtcggccttccctcacctacaagatgctcaagtaaagctctttgtgacagggcttttcagcttaaatcaagatattcctgctttcaaggaacatttaagagatttcctagttcaaataaaggaatttgcaggtgaagacacttctgatttgtttttggaagagagagaaatagccctacggcaggctgatgaagagaaacataaacgtcaaatgtctgtccctggcatctttaatccacatgagattccagaagaaatgtgtgattaaaatccaaattcatgctgttttttttctctgcaactccgttagcagaggaaaacagcatgtgggtatttgtcgaccaaaatgatgccaatttgtaaattaaaatgtcacctagtggccctttttcttatgtgtttttttgtataagaaattttctgtgaaatatccttccattgtttaagcttttgttttggtcatctttatttagtttgcatgaagttgaaaattaaggcatttttaaaaattttacttcatgcccatttttgtggctgggctggggggaggaggcaaattcaatttgaacatatacttgtaattctaatgcaaaattatacaatttttcctgtaaacaataccaatttttaattagggagcattttccttctagtctatttcagcctagaagaaaagataatgagtaaaacaaattgcgttgtttaaaggattatagtgctgcattgtctgaagttagcacctcttggactgaatcgtttgtctagactacatgtattacaaagtctctttggcaagattgcagcaagatcatgtgcatatcatcccattgtaaagcgacttcaaaaatatgggaacacagttagttatttttacacagttctttttgtttttgtgtgtgtgtgctgtcgcttgtcgacaacagctttttgttttcctcaatgaggagtgttgctcatttgtgagccttcattaactcgaagtgaaatggttaaaaatatttatcctgttagaataggctgcatctttttaacaactcattaaaaaacaaaacaactctggcttttgagatgacttatactaatttacattgtttaccaagctgtagtgctttaagaacactacttaaaaagcaaaataaacttggtttacatttaaaaaaaa

SEQ ID NO: 731 - DNA, 1890 bp, Homo sapiens
  Genbank Accession No. Y12711
gacccacgcgtccggggaggagaaagtggcgagttccggatccctgcctagcgcggcccaacctttactccagagatcatggctgccgaggatgtggtggcgactggcgccgacccaagcgatctggagagcggcgggctgctgcatgagattttcacgtcgccgctcaacctgctgctgcttggcctctgcatcttcctgctctacaagatcgtgcgcggggaccagccggcggccagcggcgacagcgacgacgacgagccgccccctctgccccgcctcaagcggcgcgacttcacccccgccgagctgcggcgcttcgacggcgtccaggacccgcgcatactcatggccatcaacggcaaggtgttcgatgtgaccaaaggccgcaaattctacgggcccgaggggccgtatggggtctttgctggaagagatgcatccaggggccttgccacattttgcctggataaggaagcactgaaggatgagtacgatgacctttctgacctcactgctgcccagcaggagactctgagtgactgggagtctcagttcactttcaagtatcatcacgtgggcaaactgctgaaggagggggaggagcccactgtgtactcagatgaggaagaaccaaaagatgagagtgcccggaaaaatgattaaagcattcagtggaagtatatctatttttgtattttgcaaaatcatttgtaacagtccactctgtctttaaaacatagtgattacaatatttagaaagttttgagcacttgctataagttttttaattaacatcactagtgacactaataaaattaacttcttagaatgcatgatgtgtttgtgtgtcacaaatccagaaagtgaactgcagtgctgtaatacacatgttaatactgtttttcttctatctgtagttagtacaggatgaatttaaatgtgtttttcctgagagacaaggaagacttgggtatttcccaaaacaggtaaaaatcttaaatgtgcaccaagagcaaaggatcaacttttagtcatgatgttctgtaaagacaacaaatccctttttttttctcaattgacttaactgcatgatttctgttttatctacctctaaagcaaatctgcagtgttccaaagactttggtatggattaagcgctgtccagtaacaaaatgaaatctcaaaacagagctcagctgcaaaaaagcatattttctgtgtttctggactgcactgttgtccttgccctcacatagacactcagacaccctcacaaacacagtagtctatagttaggattaaaataggatctgaacattcaaaagaaagctttggaaaaaaagagctggctggcctaaaaacctaaatatatgatgaagattgtaggactgtcttcccaagccccatgttcatggtggggcaatggttatttggttattttactcaattggttactctcatttgaaatgagggagggacatacagaataggaacaggtgtttgctctcctaagagccttcatgcacacccctgaaccacgaggaaacagtacagtcgctagtcaagtggtttttaaagtaaagtatattcataaggtaacagttattctgttgttataaaactatacccactgcaaaagtagtagtcaagtgtctaggtctttgatattgctcttttggttaacactaagcttaagtagactatacagttgtatgaatttgtaaaagtatatgaacacctagtgagatttcaaacttgtaattgtggttaaatagtcattgtattttcttgtgaactgtgttttatgattttacctcaaatcagaaaacaaaatgatgtgctttggtcagttaataaaaatggttttacccactaaaaaaaaaaaaa

SEQ ID NO: 732 - DNA, 2038 bp, Homo sapiens
  Genbank Accession No. Z11793
gcaggcccgttggaagtggttgtgacaaccccagcaatgtggagaagcctggggcttgccctggctctctgtctcctcccatcgggaggaacagagagccaggaccaaagctccttatgtaagcaacccccagcctggagcataagagatcaagatccaatgctaaactccaatggttcagtgactgtggttgctcttcttcaagccagctgatacctgtgcatcatcgaggcatctaaattagaagacctgcgagtaaaactgaagaaagaaggatattctaatatttcttatattgttgttaatcatcaaggaatctcttctcgattaaaatacacacatcttaagaataaggtttcagagcatattcctgtttatcaacaagaagaaaaccaaacagatgtctggactcttttaaatggaagcaaagatgacttcctcatatatgatagatgtggccgtcttgtatatcatcttggtttgcctttttccttcctaactttcccatatgtagaagaagccattaagattgcttactgtgaaaagaaatgtggaaactgctctctcacgactctcaaagatgaagacttttgtaaacgtgtatctttggctactgtggataaaacagttgaaactccatcgcctcattaccatcatgagcatcatcacaatcatggacatcagcaccttggcagcagtgagctttcagagaatcagcaaccaggagcaccaaatgctcctactcatcctgctcctccaggccttcatcaccaccataagcacaagggtcagcataggcagggtcacccagagaaccgagatatgccagcaagtgaagatttacaagatttacaaaagaagctctgtcgaaagagatgtataaatcaattactctgtaaattgcccacagattcagagttggctcctaggagctgatgctgccattgtcgacatctgatatttgaaaaaacagggtctgcaatcacctgacagtgtaaagaaaacctcccatctttatgtagctgacagggacttcgggcagaggagaacataactgaatcttgtcagtgacgtttgcctccagctgcctgacaaataagtcagcagcttatacccacagaagccagtgccagttgacgctgaaagaatcaggcaaaaaagtgagaatgaccttcaaactaaatatttaaaataggacatactccccaatttagtctagacacaatttcatttccagcatttttataaactaccaaattagtgaaccaaaaatagaaattagatttgtgcaaacatggagaaatctactgaattggcttccagattttaaattttatgtcatagaaatattgactcaaaccatattttttatgatggagcaactgaaaggtgattgcagcttttggttaatatgtctttttttttctttttccagtgttctatttgctttaatgagaatagaaacgtaaactatgacctaggggttttctgttggataattagcagtttagaatggaggaagaacaacaaagacatgctttccattttttcctttacttatctctcaaaacaatattactttgtcttttcaatcttctacttttaactaataaaataagtggattttgtattttaagatccagaaatacttaacacgtgaatattttgctaaaaaagcatatataactattttaaatatccatttatcttttgtatatctaagactcatcctgatttttactatcacacatgaataaaggcctttgtatctttctttctctaatgttgtatcatactcttctaaaacttgagtggctgtcttaaaagatataaggggaaagataatattgtctgtctctatattgcttagtaagtatttccatagtcaatgatggtttaataggtaaaccaaaccctataaacctgacctcctttatggttaatactattaagcaagaatgcagtacagaattggatacagtacggatttgtccaaataaattcaataaaaaccttaaaaaaaaaaaaaaaaaaaaaa

SEQ ID NO: 733 - DNA, 260 bp, Homo sapiens
  Genbank Accession No. Z38266
aaaccacaaatacgtttattcctctaaaaacagtataccatctttccaattttcaaaatgttattatcaattgtctgcagattactctcattaagctgatttttaaaaatctcagacagagcagagcaattcaccagcaccatcatcaagtgagctacaaatctatcttttaccagagcaaggagacacttaagatcaattcaagagaatagctttcagtgttcacagaaggggtactcacattcatttgtcacatattt

SEQ ID NO: 734 - DNA, 270 bp, Homo sapiens
  Genbank Accession No. Z38744
  unsure (1)..(270): n = a or c or g or t
aatctgaattaagaataaatttattaggaaattattagtatagttagacagtatccagcaaaaaaggttattttatacctctacttttccaaaacgaggaaacctccccacaaatcccatcaacacacagtcatgctggaaggcattctgtcttactctgttggtttcatgtaaatgtttggggtgactcattccgcctcttctnttctcaagttccaggcttcttgggtagaccaaaactaatacacaatgttagagcacacaagagac

SEQ ID NO: 735 - DNA, 287 bp, Homo sapiens
  Genbank Accession No. Z38785
atccaggtggttttatttagtaaaattttacaaaagtcagggctgacttcttggctctgcccttcgaagagcacagttttccttagcagataactgggggaagccacgggcccaccagaggctctcgcaggccagtggtgcgacctcctgtccacaaccgtgagggacaaaggcctgtccttgaggctgctgggcaggggcccaggcagtaagtgagggcacctgcgaggctctgaggacacagcacatctgtacaccctcatggtgccctgaccacacagcagcca

SEQ ID NO: 736 - DNA, 323 bp, Homo sapiens
  Genbank Accession No. Z39904
  unsure (1)..(323): n = a or c or g or t
aaggaattataaactaactttaattacttcaacaggaagaatttcaaactatgttgtaattcttattttaaagtttaaatctaattaatatattctgactaacataatcatccaaagataaaagtatttgtgatggcaaatggacagaacaatcatttaggtagcatctaggaatattgctacaattactttacataaatngaaatccacgtctttattagtaatgtnccacacatcttagagtaaaaatttacataagataggcttataaatatacataaatctcaaaattaatcacaaacattaggtacacaattgttata

SEQ ID NO: 737 - DNA, 326 bp, Homo sapiens
  Genbank Accession No. Z39983
catctttgtaaatacgggcttttattcactgccagctccaggatggaaggagggggtgaatcatgcacagccttggtctaccctccaacactaggcagtgctggacaggggactcagaaagggaagcagagtgggctgttgatgtctggaaagctccctcaccagagtgcccagtgggtcacacagcatcatgggggatgagctggggctggagtcggctgtatctgacaccagaccctccattcaagctcccttgatgacaacgcccacaacagggtctggctgatgctccgttctgccacgactcctgctgggtgatcgtggga

SEQ ID NO: 738 - DNA, 254 bp, Homo sapiens
  Genbank Accession No. Z40186
  unsure (1)..(254): n = a or c or g or t
cagtttttatttatttttatttgatttttttttccttaagaatcatagtaaaccttagcagtagttgggcactgcatgaaaaatgaagtttacatagtttatattatgtacataaactagtgatttacattgatttacacatgattggngcctaatttattaatcagcacgcagcatgtaaatgtgctcaaaagaaatcaaggtttaaaataagttttccataatattcataaacattttcgctggtgtaaatg

SEQ ID NO: 739 - DNA, 346 bp, Homo sapiens
  Genbank Accession No. Z40556
  unsure (1)..(346): n = a or c or g or t
gagaatacaagaaccttttattttccatccagttgggcagcagggaaaggctaggtgggcccagcctgcccttccttcctccagctggctggatttattatnagccaggagaaagcagccctggaacccagactctgtctcccccttgaggtcacagatgttgaagttggaatctcgctccttcccctgactaccatcctaggctgggcctcaagactagtgaggcctgtccccaccatccctggccttgttgtggggctcaggaactcagagtcccagtgttgagtctgggagcactaggtcttcatagttccaggcccagagctacagctgggctgggagcatg

SEQ ID NO: 740 - DNA, 292 bp, Homo sapiens
  Genbank Accession No. Z40715
aaaattccttattttatttcaaaaaatgtaggggtggggaagtaacatgataaacattacgatcagctccctatgggttcattctgcctctgcgggggtcgggggcatacagtagctggggggcatgccattgccatggcaacccagatgcttagatgcaggtccctcctggctgcttagagctggggggactaggcgccctccccgaaagcccccattctgagttgttggtgcctgcccttcccctgaatctaagaactgattagtgggttagactgcaacagcagctcag

SEQ ID NO: 741 - DNA, 270 bp, Homo sapiens
  Genbank Accession No. Z40898
ggtcgttatgctgcatttattatgagaatcaacagtcaacagttaatgattgactaactcttgttgttcactctggacattaacgaaaaagactggaatagggctacagcgctgcttttatgctacacgggttatgcttggactctgactcccagcagcaggtagattcaggaattcatggcagtgacattcaccatcatgggaaacaccttcccttttcttcaggattctctgtagtggaagagagcacccagtgttgggctgaaaaca

SEQ ID NO: 742 - DNA, 333 bp, Homo sapiens
  Genbank Accession No. Z41642
  unsure (1)..(333): n = a or c or g or t
cagatatccaatttttaattaattaaaactttacaatgtattacataatccatggaaggagagaaaggggatgaaactgaaggaaccaggactctggaggatgcaggatgctgtttctctggatgagatgtactctgccactgtnctctctgggcactttcagatgatggggtctgagatgtgtcctcaggctgcatcagctgtcttcagtctccagaacagaaagagcctgacccaggggcatcttggtggccaccagaaccaggtttctgggagagagttcaggactgaagatgggcaggagctcagcatggaaacctgggagaaagggcc

SEQ ID NO: 743 - DNA, 1569 bp, Homo sapiens
  Genbank Accession No. Z48501
atgctctacgagaagttcagcccggccgggcccatcctctccatccgggtctgcagggacatgatcacccgccgctccttgggctacgcgtatgtgaacttccagcagccggcggacgcggagcgtgctttggacaccatgaattttgatgttataaagggcaagccagtacgcatcatgtggtctcagcgtgatccatcacttcgcaaaagtggagtaggcaacatattcattaaaaatctggacaaatccattgataataaagcactgtatgatacattttctgcttttggtaacatcctttcatgtaaggtggtttgtgatgaaaatggttccaagggctatggatttgtacactttgagacgcaggaagcagctgaaagagctattgaaaaaatgaatggaatgctcctaaatgatcgcaaagtatttgttggacgatttaagtctcgtaaagaacgagaagctgaacttggagctagggcaaaagaattcaccaatgtttacatcaagaattttggagaagacatggatgatgagcgccttaaggatctctttggcaagtttgggcctgccttaagtgtgaaagtaatgactgatgaaagtggaaaatccaaaggatttggatttgtaagctttgaaaggcatgaagatgcacagaaagctgtggatgagatgaacggaaaggagctcaatggaaaacaaatttatgttggtcgagctcagaaaaaggtggaacggcagacggaacttaagcgcaaatttgaacagatgaaacaagataggatcaccagataccagggtgttaatctttatgtgaaaaatcttgatgatggtattgatgatgaacgtctccggaaagagttttctccatttggtacaatcactagtgcaaaggttatgatggagggtggtcgcagcaaagggtttggttttgtatgtttctcctccccagaagaagccactaaagcagttacagaaatgaacggtagaattgtggccacaaagccattgtatgtagctttagctcagcgcaaagaagagcgccaggctcacctcactaaccagtatatgcagagaatggcaagtgtacgagctgttcccaaccctgtaatcaacccctaccagccagcacctccttcaggttacttcatcgcagctatcccacagactcagaaccgtgctgcatactatcctcctagccaaattgctcaactaagaccaagtcctcgctggactgctcagggtgccagacctcatcctgctgttcatgtacaaggtcaggaacctttgactgcttccatgttggcatctgcccctcctcaagagcaaaagcaaatgttgggtgaacggctgtttcctcttattcaagccatgcaccctactcttgctggtaaaatcactggcatgttgttggagattgataattcagaacttcttcatatgctcgagtctccagagtcactccgttctaaggttgatgaagctgtagctgtactacaagcccaccaagctaaagaggctgcccagaaagcagttaacagtgccaccggtgttccaactgtttaa

SEQ ID NO: 744 - DNA, 4553 bp, Homo sapiens
  Genbank Accession No. Z69881
ggcggcatggaggcggcgcatctgctcccggccgccgacgtgctgcgccacttctcggtgacagccgagggcggcctgagcccggcgcaggtgaccggcgcgcgggagcgctacggccccaacgagctcccgagtgaggaagggaagtccctgtgggagctggtgctggaacagtttgaggacctcctggtgcgcatcctgctgctggctgcccttgtctcctttgtcctggcctggttcgaggagggcgaggagaccacgaccgccttcgtggagcccctggtcatcatgctgatcctcgtggccaacgccattgtgggcgtgtggcaggaacgcaacgccgagagtgccatcgaggccctgaaggagtatgagcctgagatgggcaaggtgatccgctcggaccgcaagggcgtgcagaggatccgtgcccgggacatcgtcccaggggacattgtagaagtggcagtgggggacaaagtgcctgctgacctccgcctcatcgagatcaagtccaccacgctgcgagtggaccagtccatcctgacgggtgaatctgtgtccgtgaccaagcacacagaggccatcccagaccccagagctgtgaaccaggacaagaagaacatgctgttttctggcaccaatatcacatcgggcaaagcggtgggtgtggccgtggccaccggcctgcacacggagctgggcaagatccggagccagatggcggcagtcgagcccgagcggacgccgctgcagcgcaagctggacgagtttggacggcagctgtcccacgccatctctgtgatctgcgtggccgtgtgggtcatcaacatcggccacttcgccgacccggcccacggtggctcctggctgcgtggcgctgtctactacttcaagatcgccgtggccctggcggtggcggccatccccgagggcctcccggctgtcatcactacatgcctggcactgggcacgcggcgcatggcacgcaagaacgccatcgtgcgaagcctgccgtccgtggagaccctgggctgcacctcagtcatctgctccgacaagacgggcacgctcaccaccaatcagatgtctgtctgccggatgttcgtggtagccgaggccgatgcgggctcctgccttttgcacgagttcaccatctcgggtaccacgtatacccccgagggcgaagtgcggcagggggatcagcctgtgcgctgcggccagttcgacgggctggtggagctggcgaccatctgcgccctgtgcaacgactcggcgctggactacaacgaggccaagggtgtgtacgagaaggtgggagaggccacggagacagctctgacttgcctggtggagaagatgaatgtgttcgacaccgacctgcaggctctgtcccgggtggagcgagctggcgcctgtaacacggtcatcaagcagctgatgcggaaggagttcaccctggagttctcccgagaccggaaatccatgtccgtgtactgcacgcccacccgccctcaccctaccggccagggcagcaagatgtttgtgaagggggctcctgagagtgtgatcgagcgctgtagctcagtccgcgtggggagccgcacagcacccctgacccccacctccagggagcagatcctggcaaagatccgggattggggctcaggctcagacacgctgcgctgcctggcactggccacccgggacgcgcccccaaggaaggaggacatggagctggacgactgcagcaagtttgtgcagtacgagacggacctgaccttcgtgggctgcgtaggcatgctggacccgccgcgacctgaggtggctgcctgcatcacacgctgctaccaggcgggcatccgcgtggtcatgatcacgggggataacaaaggcactgccgtggccatctgccgcaggcttggcatctttggggacacggaagacgtggcgggcaaggcctacacgggccgcgagtttgatgacctcagccccgagcagcagcgccaggcctgccgcaccgcccgctgcttcgcccgcgtggagcccgcacacaagtcccgcatcgtggagaacctgcagtcctttaacgagatcactgctatgactggcgatggagtgaacgacgcaccagccctgaagaaagcagagatcggcatcgccatgggctcaggcacggccgtggccaagtcggcggcagagatggtgctgtcagatgacaactttgcctccatcgtggctgcggtggaggagggccgggccatctacagcaacatgaagcaattcatccgctacctcatctcctccaatgttggcgaggtcgtctgcatcttcctcacggcaattctgggcctgcccgaagccctgatccctgtgcagctgctctgggtgaacctggtgacagatggcctacctgccacggctctgggcttcaacccgccagacctggacatcatagagaagctgccccggagcccccgagaagccctcatcagtggctggctcttcttccgatacctggctatcggagtgtacgtaggcctggccacagtggctgccgccacctggtggtttgtgtatgacgccgagggacctcacatcaacttctaccagctgaggaacttcctgaagtgctccgaagacaacccgctctttgccggcatcgactgtgaggtgttcgagtcacgcttccccaccaccatggccttgtccgtgctcgtgaccattgaaatgtgcaatgccctcaacagcgtctcggagaaccagtcgctgctgcggatgccgccctggatgaacccctggctgctggtggctgtggccatgtccatggccctgcacttcctcatcctgctcgtgccgcccctgcctctcattttccaggtgaccccactgagcgggcgccagtgggtggtggtgctccagatatctctgcctgtcatcctgctggatgaggccctcaagtacctgtcccggaaccacatgcacgaagaaatgagccagaagtgagcgctgggaacagggtggagtctccggtgtgtacctcagactgatggtgcccatgtgttcgcctccgccccccacccttgccaccacactcgcccacttgcccaccgggtcccgccggataaatgacaggcccgaggtcagaatggccatccccgggccccgtcctggggtctctgtccccacttccttctggcctgggaggtctgtaattcctgtctcctggactctcctgggaagttccctgctctgcagctctggcccaggagctgcaggctgggagggggcagccaagaagccggagctggcagcatacccagagatccggggcccccccacccccaaatcacgagtgcagctggagcttgctcccccttgttcggaagctggacgttcacttggtgactggtgcctctgcactgacggaggactctgggggtccttcttaccggctctgacctctctcttcgtgcctggtctgggactgggtcagccctgggggatcagaaggggccatctgggcccagctgtgtacagcgagggtgggcagccccctccactccactctgcttccacaaagtcggctcccgagagctcgaggctgcttctgtttatatgtgcagggcccgggccggtgaagggtcagagagacggacacaaggagccggcaggagggcggagcgaggatgtcctttcccgggagacaagtcgggaaagcctggctggactgcctcagccccgcgcgcctcctggactcagggttccccgtcctgagctcgggagatgttcagagtcacactgccgcccggtctgccacgcagaggtccaacttgccacccgcgtccctggtacctgagaccaccgacatcctcaggttcctgaccgtggcgcccttctacccagcccagtgtgcggccgccgcgctgtctgcacagctgggggcctctgagcctggtgggcttcctggactcttggcctcactccttgccccctccccacgacacccatgagccgaaaggatgtcactaaggatggctgattccccaagggcacccgctctccctccctccctgctggaggaacacgtcatatcagatgagaggaagatggcctctgatggacagaatttttctcttaactcagcttttgctactttggcaaaaactagcgaggggtagcagaaacctgcaccaaggattgtccctatgtcttggcccctcctagagcgtgtgcagactgatgattttatatgtaaatcaagactcacatccctttcctagtcccccacatccaaagcccctcagcctgccttgcagaccaatgggctccatgttctgtagccccctcccctacgcctcacccctcctccctctcacaggttctgggcggccagtgagagaaacgcagtgggggaggcagggagtctggtgcctgcagagattctctgcttctttcctggggggaggtggggaggtcttagcaggagcgggccctgtacccacctgctgacctgctgtttggtagagaaataaaggttgtgtgactggggg

SEQ ID NO: 745 - DNA, 5086 bp, Homo sapiens
  Genbank Accession No. Z74616
  unsure (1)..(5086): n = a or c or g or t
agcaccacggcagcaggaggtttcggnctaagttggaggtactggnccacgactgcatgcccgcgcccgccaggtgatacctccgccggtgacccaggggctctgcgacacaaggagtctgcatgtctaagtgctagacatgctcagctttgtggatacgcggactttgttgctgcttgcagtaaccttatgcctagcaacatgccaatctttacaagaggaaactgtaagaaagggcccagccggagatagaggaccacgtggagaaaggggtccaccaggccccccaggcagagatggtgaagatggtcccacaggccctcctggtccacctggtcctcctggcccccctggtctcggtgggaactttgctgctcagtatgatggaaaaggagttggacttggccctggaccaatgggcttaatgggacctagaggcccacctggtgcagctggagccccaggccctcaaggtttccaaggacctgctggtgagcctggtgaacctggtcaaactggtcctgcaggtgctcgtggtccagctggccctcctggcaaggctggtgaagatggtcaccctggaaaacccggacgacctggtgagagaggagttgttggaccacagggtgctcgtggtttccctggaactcctggacttcctggcttcaaaggcattaggggacacaatggtctggatggattgaagggacagcccggtgctcctggtgtgaagggtgaacctggtgcccctggtgaaaatggaactccaggtcaaacaggagcccgtgggcttcctggtgagagaggacgtgttggtgcccctggcccagctggtgcccgtggcagtgatggaagtgtgggtcccgtgggtcctgctggtcccattgggtctgctggccctccaggcttcccaggtgcccctggccccaagggtgaaattggagctgttggtaacgctggtcctgctggtcccgccggtccccgtggtgaagtgggtcttccaggcctctccggccccgttggacctcctggtaatcctggagcaaacggccttactggtgccaagggtgctgctggccttcccggcgttgctggggctcccggcctccctggaccccgcggtattcctggccctgttggtgctgccggtgctactggtgccagaggacttgttggtgagcctggtccagctggctccaaaggagagagcggtaacaagggtgagcccggctctgctgggccccaaggtcctcctggtcccagtggtgaagaaggaaagagaggccctaatggggaagctggatctgccggccctccaggacctcctgggctgagaggtagtcctggttctcgtggtcttcctggagctgatggcagagctggcgtcatgggccctcctggtagtcgtggtgcaagtggccctgctggagtccgaggacctaatggagatgctggtcgccctggggagcctggtctcatgggacccagaggtcttcctggttcccctggaaatatcggccccgctggaaaagaaggtcctgtcggcctccctggcatcgacggcaggcctggcccaattggcccagctggagcaagaggagagcctggcaacattggattccctggacccaaaggccccactggtgatcctggcaaaaacggtgataaaggtcatgctggtcttgctggtgctcggggtgctccaggtcctgatggaaacaatggtgctcagggacctcctggaccacagggtgttcaaggtggaaaaggtgaacagggtcccgctggtcctccaggcttccagggtctgcctggcccctcaggtcccgctggtgaagttggcaaaccaggagaaaggggtctccatggtgagtttggtctccctggtcctgctggtccaagaggggaacgcggtcccccaggtgagagtggtgctgccggtcctactggtcctattggaagccgaggtccttctggacccccagggcctgatggaaacaagggtgaacctggtgtggttggtgctgtgggcactgctggtccatctggtcctagtggactcccaggagagaggggtgctgctggcatacctggaggcaagggagaaaagggtgaacctggtctcagaggtgaaattggtaaccctggcagagatggtgctcgtggtgctcatggtgctgtaggtgcccctggtcctgctggagccacaggtgaccggggcgaagctggggctgctggtcctgctggtcctgctggtcctcggggaagccctggtgaacgtggcgaggtcggtcctgctggccccaacggatttgctggtccggctggtgctgctggtcaaccgggtgctaaaggagaaagaggagccaaagggcctaagggtgaaaacggtgttgttggtcccacaggccccgttggagctgctggcccagctggtccaaatggtccccccggtcctgctggaagtcgtggtgatggaggcccccctggtatgactggtttccctggtgctgctggacggactggtcccccaggaccctctggtatttctggccctcctggtccccctggtcctgctgggaaagaagggcttcgtggtcctcgtggtgaccaaggtccagttggccgaactggagaagtaggtgcagttggtccccctggcttcgctggtgagaagggtccctctggagaggctggtactgctggacctcctggcactccaggtcctcagggtcttcttggtgctcctggtattctgggtctccctggctcgagaggtgaacgtggtctacctggtgttgctggtgctgtgggtgaacctggtcctcttggcattgccggccctcctggggcccgtggtcctcctggtgctgtgggtagtcctggagtcaacggtgctcctggtgaagctggtcgtgatggcaaccctgggaacgatggtcccccaggtcgcgatggtcaacccggacacaagggagagcgcggttaccctggcaatattggtcccgttggtgctgcaggtgcacctggtcctcatggccccgtgggtcctgctggcaaacatggaaaccgtggtgaaactggtccttctggtcctgttggtcctgctggtgctgttggcccaagaggtcctagtggcccacaaggcattcgtggcgataagggagagcccggtgaaaaggggcccagaggtcttcctggcttaaagggacacaatggattgcaaggtctgcctggtatcgctggtcaccatggtgatcaaggtgctcctggctccgtgggtcctgctggtcctaggggccctgctggtccttctggccctgctggaaaagatggtcgcactggacatcctggtacggttggacctgctggcattcgaggccctcagggtcaccaaggccctgctggcccccctggtccccctggccctcctggacctccaggtgtaagcggtggtggttatgactttggttacgatggagacttctacagggctgaccagcctcgctcagcaccttctctcagacccaaggactatgaagttgatgctactctgaagtctctcaacaaccagattgagacccttcttactcctgaaggctctagaaagaacccagctcgcacatgccgtgacttgagactcagccacccagagtggagcagtggttactactggattgaccctaaccaaggatgcactatggatgctatcaaagtatactgtgatttctctactggcgaaacctgtatccgggcccaacctgaaaacatcccagccaagaactggtataggagctccaaggacaagaaacacgtctggctaggagaaactatcaatgctggcagccagtttgaatataatgtagaaggagtgacttccaaggaaatggctacccaacttgccttcatgcgcctgctggccaactatgcctctcagaacatcacctaccactgcaagaacagcattgcatacatggatgaggagactggcaacctgaaaaaggctgtcattctacagggctctaatgatgttgaacttgttgctgagggcaacagcaggttcacttacactgttcttgtagatggctgctctaaaaagacaaatgaatggggaaagacaatcattgaatacaaaacaaataagccatcacgcctgcccttccttgatattgcacctttggacatcggtggtgctgaccatgaattctttgtggacattggcccagtctgtttcaaataaatgaactcaatctaaattaaaaaagaaagaaatttgaaaaaactttctctttgccatttcttcttcttcttttttaactgaaagctgaatccttccatttcttctgcacatctacttgcttaaattgtgggcaaaagagaaaaagaaggattgatcagagcattgtgcaatacagtttcattaactccttcccccgctcccccaaaaatttgaatttttttttcaacactcttacacctgttatggaaaatgtcaacctttgtaagaaaaccaaaataaaaattgaaaaataaaaaccataaacatttgcaccacttgtggcttttgaatatcttccacagagggaagtttaaaacccaaacttccaaaggtttaaactacctcaaaacactttcccatgagtgtgatccacattgttaggtgctgacctagacagagatgaactgaggtccttgttttgttttgttcataatacaaaggtgctaattaatagtatttcagatacttgaagaatgttgatggtgctagaagaatttgagaagaaatactcctgtattgagttgtatcgtgtggtgtattttttaaaaaatttgatttagcattcatattttccatcttattcccaattaaaagtatgcagattatttgcccaaagttgtcctcttcttcagattcagcatttgttctttgccagtctcattttcatcttcttccatggttccacagaagctttgtttcttgggcaagcagaaaaattaaattgtacctattttgtatatgtgagatgtttaaataaattgtgaaaaaaatgaaataaagcatgtttggttttccaaaagaacatat

SEQ ID NO: 746 - DNA, 332 bp, Homo sapiens; identical to SEQ ID NO: 330
  Genbank Accession No. F09748

SEQ ID NO: 747 - DNA, 301 bp, Homo sapiens; identical to SEQ ID NO: 452
  Genbank Accession No. N22006

SEQ ID NO: 748 - DNA, 1830 bp, Homo sapiens
  Genbank Accession No. M64594
acttcctcagtatccacaggccacgccacctctcttcctgtcaccgacacttcctcagcatccacaagtcacgccacctctcttcctgtcactgacacttcctcagcatccacaagtcacgccacctctcttcttgtcaccgacgcttcctcagtatccacaggtgacaccacccctcttcctgtcaccgacacttcctcagcatccacaggtgacaccacccctcttcatgtcaccgacgcttcctcagtatccacaggtcacgccacccctcttcatgtcaccagcctttcctcagtatccacaggtgacaccacgcctcttcctgtcactagcccttcctcagcatcctcaggtcacgccacctctcttcctgtcaccgacgcttcctcactctccacaggtcacgccacctctcttcatgtcaccgacgcttcctcagtatccacaggtcacgccacccttcttcatgtcaccgacgcttcctcagcatccacaggccacaccacctctcttcctgtcaccgacgcttcctcagtatccacaggtgacaccacccctcttcctgtcaccgacacttcctcagcatccacaggtgacaccacccctcttcatgtcaccgacgcttcctcagtatccacaggtcacgccacccctcttcatgtcaccagcctttcctcagtatccacaggtgacaccacgcctcttcctgtcactagcccttcctcagcatcctcaggtcacgccacctctcttcctgtcaccgacgcttcctcagtgtccacaggtcacgccacctctcttcctgtcaccatcccttcctcagcatcctctggtgacgccacctctcttcctgtcaccagcctttcctcactctccacaggtcacgccacccctcttcctgtcaccagcctttcctcagcatccacaggtcacgccacccctcttcctgtcaccgacacttcctcagtatctacaggtcacgccacctctcttcttgtcaccgacgcttcctcagtatccacaggtcacgccacccctcttcatgtcaccgatgcttcctcagtatccacaggtgacaccacccctcttcctgtcaccagcccttcctcagcatccacaggtgacaccacccctcttcctgtcaccgacacttcctcagtatccacaggcgacaccacccctcttcttgtcaccgacacttcctcagtatccacaagccacgccacctctcttcctgtcaccgacacttcctcagtatccacaagccacgccacctctcttcctgtcaccgacccttcctcagcatccacaggtgacaccacccctcttcctgtcaccgacacttcctcagtatccacaagccacgccacctctcttcctgtcaccgacacttcctcagcatccacaagtcacgccacctctcttcctgtcactgacacttcctcagcatccacaggtcacgccacccctcttcctgtcaccgacacttcctcagcatccacaggtcacgccacccctcttcttgtcaccgacacttcctcagcatccacaggtcacaccacccctcttcatgtcaccagcccttcctcagcatccacaggtcacgccacccctcttcctgtcaccagcccttcctcagcatccacaagtcacgccacctctcttcctgtcaccgacacttcctcagcatccacaggtcacgccacccctcttcttgtcaccgacacttcctcagcatccacaggtcacgccacccctcttcttgtcaccgacacttcctcagcatccacaggtcacgccacccctcttcctgtcaccgacacttcc

SEQ ID NO: 749 - DNA, 25 bp, Artificial Sequence
  Description of Artificial Sequence:  Forward PCR primer, cellular retinol binding protein
catggctttgttttaagaaaaggaa

SEQ ID NO: 750 - DNA, 16 bp, Artificial Sequence
  Description of Artificial Sequence:  Reverse PCR primer, cellular retinol binding protein
agccacccccaggcat

SEQ ID NO: 751 - DNA, 33 bp, Artificial Sequence
  Description of Artificial Sequence:  Probe for cellular retinol binding protein
agtgacaaagccaagagacagactctgctaaca

SEQ ID NO: 752 - DNA, 21 bp, Artificial Sequence
  Description of Artificial Sequence:  Forward PCR primer, S100 calcium binding protein
aaagacaaggatgccgtggat

SEQ ID NO: 753 - DNA, 21 bp, Artificial Sequence
  Description of Artificial Sequence:  Reverse PCR primer, S100 calcium binding protein
agccacgaacacgatgaactc

SEQ ID NO: 754 - DNA, 19 bp, Artificial Sequence
  Description of Artificial Sequence:  Forward PCR primer, PSMA
tggctcagcaccaccagat

SEQ ID NO: 755 - DNA, 21 bp, Artificial Sequence
  Description of Artificial Sequence:  Reverse PCR primer, PSMA
ttccagtaaagccaggtccaa
